United States Patent Application Publication US 2011/0112168 A1 - sequence listing, part 3

SEQ ID NO: 62530 - RNA, 23 nt, Artificial Sequence
  Chemically synthesized
ugagaauugcagugauuugcuuu

SEQ ID NO: 62531 - RNA, 23 nt, Artificial Sequence
  Chemically synthesized
augagaauugcagugauuugcuu

SEQ ID NO: 62532 - RNA, 23 nt, Artificial Sequence
  Chemically synthesized
aagaaaugcaaacuaucacugua

SEQ ID NO: 62533 - RNA, 23 nt, Artificial Sequence
  Chemically synthesized
accugugccauaccaguuaaaca

SEQ ID NO: 62534 - RNA, 23 nt, Artificial Sequence
  Chemically synthesized
caccugugccauaccaguuaaac

SEQ ID NO: 62535 - RNA, 23 nt, Artificial Sequence
  Chemically synthesized
ucaccugugccauaccaguuaaa

SEQ ID NO: 62536 - RNA, 23 nt, Artificial Sequence
  Chemically synthesized
aucaccugugccauaccaguuaa

SEQ ID NO: 62537 - RNA, 23 nt, Artificial Sequence
  Chemically synthesized
caucaccugugccauaccaguua

SEQ ID NO: 62538 - RNA, 23 nt, Artificial Sequence
  Chemically synthesized
augaaaugcuucuuucucaguuu

SEQ ID NO: 62539 - RNA, 23 nt, Artificial Sequence
  Chemically synthesized
caaaaugaaagagaacaugaaau

SEQ ID NO: 62540 - RNA, 23 nt, Artificial Sequence
  Chemically synthesized
agccgugggaaggacaguuauga

SEQ ID NO: 62541 - RNA, 23 nt, Artificial Sequence
  Chemically synthesized
gugugguuuauggacugagguca

SEQ ID NO: 62542 - RNA, 23 nt, Artificial Sequence
  Chemically synthesized
agugugguuuauggacugagguc

SEQ ID NO: 62543 - RNA, 23 nt, Artificial Sequence
  Chemically synthesized
uagugugguuuauggacugaggu

SEQ ID NO: 62544 - RNA, 23 nt, Artificial Sequence
  Chemically synthesized
auagugugguuuauggacugagg

SEQ ID NO: 62545 - RNA, 23 nt, Artificial Sequence
  Chemically synthesized
gauagugugguuuauggacugag

SEQ ID NO: 62546 - RNA, 23 nt, Artificial Sequence
  Chemically synthesized
gcagaccugacauccaguacccu

SEQ ID NO: 62547 - RNA, 23 nt, Artificial Sequence
  Chemically synthesized
cgcagaccugacauccaguaccc

SEQ ID NO: 62548 - RNA, 23 nt, Artificial Sequence
  Chemically synthesized
ucgcagaccugacauccaguacc

SEQ ID NO: 62549 - RNA, 23 nt, Artificial Sequence
  Chemically synthesized
uucgcagaccugacauccaguac

SEQ ID NO: 62550 - RNA, 23 nt, Artificial Sequence
  Chemically synthesized
uuucgcagaccugacauccagua

SEQ ID NO: 62551 - RNA, 23 nt, Artificial Sequence
  Chemically synthesized
ggugauagugugguuuauggacu

SEQ ID NO: 62552 - RNA, 23 nt, Artificial Sequence
  Chemically synthesized
ugaugaagaugaugaugaccaug

SEQ ID NO: 62553 - RNA, 23 nt, Artificial Sequence
  Chemically synthesized
augaugaagaugaugaugaccau

SEQ ID NO: 62554 - RNA, 23 nt, Artificial Sequence
  Chemically synthesized
gaugaugaagaugaugaugacca

SEQ ID NO: 62555 - RNA, 23 nt, Artificial Sequence
  Chemically synthesized
cccuguaaacuaaaagcuucagg

SEQ ID NO: 62556 - RNA, 23 nt, Artificial Sequence
  Chemically synthesized
ccaugaauuucacagccaugaag

SEQ ID NO: 62557 - RNA, 23 nt, Artificial Sequence
  Chemically synthesized
gccaugaauuucacagccaugaa

SEQ ID NO: 62558 - RNA, 23 nt, Artificial Sequence
  Chemically synthesized
agccaugaauuucacagccauga

SEQ ID NO: 62559 - RNA, 23 nt, Artificial Sequence
  Chemically synthesized
cagccaugaauuucacagccaug

SEQ ID NO: 62560 - RNA, 23 nt, Artificial Sequence
  Chemically synthesized
acagccaugaauuucacagccau

SEQ ID NO: 62561 - RNA, 23 nt, Artificial Sequence
  Chemically synthesized
gaacaugaaaugcuucuuucuca

SEQ ID NO: 62562 - RNA, 23 nt, Artificial Sequence
  Chemically synthesized
agaacaugaaaugcuucuuucuc

SEQ ID NO: 62563 - RNA, 23 nt, Artificial Sequence
  Chemically synthesized
gagaacaugaaaugcuucuuucu

SEQ ID NO: 62564 - RNA, 23 nt, Artificial Sequence
  Chemically synthesized
agagaacaugaaaugcuucuuuc

SEQ ID NO: 62565 - RNA, 23 nt, Artificial Sequence
  Chemically synthesized
aggacuccauugacucgaacgac

SEQ ID NO: 62566 - RNA, 23 nt, Artificial Sequence
  Chemically synthesized
caggacuccauugacucgaacga

SEQ ID NO: 62567 - RNA, 23 nt, Artificial Sequence
  Chemically synthesized
ccaggacuccauugacucgaacg

SEQ ID NO: 62568 - RNA, 23 nt, Artificial Sequence
  Chemically synthesized
gccaggacuccauugacucgaac

SEQ ID NO: 62569 - RNA, 23 nt, Artificial Sequence
  Chemically synthesized
agccaggacuccauugacucgaa

SEQ ID NO: 62570 - RNA, 23 nt, Artificial Sequence
  Chemically synthesized
ugaccacauggaugauauggaug

SEQ ID NO: 62571 - RNA, 23 nt, Artificial Sequence
  Chemically synthesized
augaccacauggaugauauggau

SEQ ID NO: 62572 - RNA, 23 nt, Artificial Sequence
  Chemically synthesized
cccacgguuguccagcaauuaau

SEQ ID NO: 62573 - RNA, 23 nt, Artificial Sequence
  Chemically synthesized
agccaugaagauaugcugguugu

SEQ ID NO: 62574 - RNA, 23 nt, Artificial Sequence
  Chemically synthesized
cagccaugaagauaugcugguug

SEQ ID NO: 62575 - RNA, 23 nt, Artificial Sequence
  Chemically synthesized
acagccaugaagauaugcugguu

SEQ ID NO: 62576 - RNA, 23 nt, Artificial Sequence
  Chemically synthesized
ucugaugaacuggucacugauuu

SEQ ID NO: 62577 - RNA, 23 nt, Artificial Sequence
  Chemically synthesized
aucugaugaacuggucacugauu

SEQ ID NO: 62578 - RNA, 23 nt, Artificial Sequence
  Chemically synthesized
aaucugaugaacuggucacugau

SEQ ID NO: 62579 - RNA, 23 nt, Artificial Sequence
  Chemically synthesized
gaaucugaugaacuggucacuga

SEQ ID NO: 62580 - RNA, 23 nt, Artificial Sequence
  Chemically synthesized
ucucaccauucugaugaaucuga

SEQ ID NO: 62581 - RNA, 23 nt, Artificial Sequence
  Chemically synthesized
agaugaugaugaccauguggaca

SEQ ID NO: 62582 - RNA, 23 nt, Artificial Sequence
  Chemically synthesized
aagaugaugaugaccauguggac

SEQ ID NO: 62583 - RNA, 23 nt, Artificial Sequence
  Chemically synthesized
gaagaugaugaugaccaugugga

SEQ ID NO: 62584 - RNA, 23 nt, Artificial Sequence
  Chemically synthesized
ugaagaugaugaugaccaugugg

SEQ ID NO: 62585 - RNA, 23 nt, Artificial Sequence
  Chemically synthesized
augaagaugaugaugaccaugug

SEQ ID NO: 62586 - RNA, 23 nt, Artificial Sequence
  Chemically synthesized
gaaguucugaggaaaagcagcuu

SEQ ID NO: 62587 - RNA, 23 nt, Artificial Sequence
  Chemically synthesized
ggaaguucugaggaaaagcagcu

SEQ ID NO: 62588 - RNA, 23 nt, Artificial Sequence
  Chemically synthesized
ucccacgguuguccagcaauuaa

SEQ ID NO: 62589 - RNA, 23 nt, Artificial Sequence
  Chemically synthesized
uucccacgguuguccagcaauua

SEQ ID NO: 62590 - RNA, 23 nt, Artificial Sequence
  Chemically synthesized
uuucccacgguuguccagcaauu

SEQ ID NO: 62591 - RNA, 23 nt, Artificial Sequence
  Chemically synthesized
ccuguaaacuaaaagcuucaggg

SEQ ID NO: 62592 - RNA, 23 nt, Artificial Sequence
  Chemically synthesized
cacagccaugaauuucacagcca

SEQ ID NO: 62593 - RNA, 23 nt, Artificial Sequence
  Chemically synthesized
ucaggaacuuuccaaagucagcc

SEQ ID NO: 62594 - RNA, 23 nt, Artificial Sequence
  Chemically synthesized
gucaggaacuuuccaaagucagc

SEQ ID NO: 62595 - RNA, 23 nt, Artificial Sequence
  Chemically synthesized
agucaggaacuuuccaaagucag

SEQ ID NO: 62596 - RNA, 23 nt, Artificial Sequence
  Chemically synthesized
uagucaggaacuuuccaaaguca

SEQ ID NO: 62597 - RNA, 23 nt, Artificial Sequence
  Chemically synthesized
auagucaggaacuuuccaaaguc

SEQ ID NO: 62598 - RNA, 23 nt, Artificial Sequence
  Chemically synthesized
guccccacaguagacacauauga

SEQ ID NO: 62599 - RNA, 23 nt, Artificial Sequence
  Chemically synthesized
gaacuggucacugauuuucccac

SEQ ID NO: 62600 - RNA, 23 nt, Artificial Sequence
  Chemically synthesized
gauauggaugaugaagaugauga

SEQ ID NO: 62601 - RNA, 23 nt, Artificial Sequence
  Chemically synthesized
ugucugcagcagcauuuaaauuc

SEQ ID NO: 62602 - RNA, 23 nt, Artificial Sequence
  Chemically synthesized
augucugcagcagcauuuaaauu

SEQ ID NO: 62603 - RNA, 23 nt, Artificial Sequence
  Chemically synthesized
gaugucugcagcagcauuuaaau

SEQ ID NO: 62604 - RNA, 23 nt, Artificial Sequence
  Chemically synthesized
ggaugucugcagcagcauuuaaa

SEQ ID NO: 62605 - RNA, 23 nt, Artificial Sequence
  Chemically synthesized
ccauaccaguuaaacaggcugau

SEQ ID NO: 62606 - RNA, 23 nt, Artificial Sequence
  Chemically synthesized
gccauaccaguuaaacaggcuga

SEQ ID NO: 62607 - RNA, 23 nt, Artificial Sequence
  Chemically synthesized
cuguaaacuaaaagcuucagggu

SEQ ID NO: 62608 - RNA, 23 nt, Artificial Sequence
  Chemically synthesized
uucauggaaacucccuguaaacu

SEQ ID NO: 62609 - RNA, 23 nt, Artificial Sequence
  Chemically synthesized
cuucauggaaacucccuguaaac

SEQ ID NO: 62610 - RNA, 23 nt, Artificial Sequence
  Chemically synthesized
gcuucauggaaacucccuguaaa

SEQ ID NO: 62611 - RNA, 23 nt, Artificial Sequence
  Chemically synthesized
caggaacuuuccaaagucagccg

SEQ ID NO: 62612 - RNA, 23 nt, Artificial Sequence
  Chemically synthesized
gauagucaggaacuuuccaaagu

SEQ ID NO: 62613 - RNA, 23 nt, Artificial Sequence
  Chemically synthesized
ugagagcaaugagcauuccgaug

SEQ ID NO: 62614 - RNA, 23 nt, Artificial Sequence
  Chemically synthesized
augagagcaaugagcauuccgau

SEQ ID NO: 62615 - RNA, 23 nt, Artificial Sequence
  Chemically synthesized
gaugagagcaaugagcauuccga

SEQ ID NO: 62616 - RNA, 23 nt, Artificial Sequence
  Chemically synthesized
caucaccucacacauggaaagcg

SEQ ID NO: 62617 - RNA, 23 nt, Artificial Sequence
  Chemically synthesized
acaucaccucacacauggaaagc

SEQ ID NO: 62618 - RNA, 23 nt, Artificial Sequence
  Chemically synthesized
gacaucaccucacacauggaaag

SEQ ID NO: 62619 - RNA, 23 nt, Artificial Sequence
  Chemically synthesized
uuauggacugaggucaaaaucua

SEQ ID NO: 62620 - RNA, 23 nt, Artificial Sequence
  Chemically synthesized
gccagcaaccgaaguuuucacuc

SEQ ID NO: 62621 - RNA, 23 nt, Artificial Sequence
  Chemically synthesized
ugccagcaaccgaaguuuucacu

SEQ ID NO: 62622 - RNA, 23 nt, Artificial Sequence
  Chemically synthesized
cugccagcaaccgaaguuuucac

SEQ ID NO: 62623 - RNA, 23 nt, Artificial Sequence
  Chemically synthesized
ccugccagcaaccgaaguuuuca

SEQ ID NO: 62624 - RNA, 23 nt, Artificial Sequence
  Chemically synthesized
accugccagcaaccgaaguuuuc

SEQ ID NO: 62625 - RNA, 23 nt, Artificial Sequence
  Chemically synthesized
gaccugccagcaaccgaaguuuu

SEQ ID NO: 62626 - RNA, 23 nt, Artificial Sequence
  Chemically synthesized
caugaccacauggaugauaugga

SEQ ID NO: 62627 - RNA, 23 nt, Artificial Sequence
  Chemically synthesized
ccaugaccacauggaugauaugg

SEQ ID NO: 62628 - RNA, 23 nt, Artificial Sequence
  Chemically synthesized
gccaugaccacauggaugauaug

SEQ ID NO: 62629 - RNA, 23 nt, Artificial Sequence
  Chemically synthesized
agccaugaccacauggaugauau

SEQ ID NO: 62630 - RNA, 23 nt, Artificial Sequence
  Chemically synthesized
cgaaagccaugaccacauggaug

SEQ ID NO: 62631 - RNA, 23 nt, Artificial Sequence
  Chemically synthesized
acgaaagccaugaccacauggau

SEQ ID NO: 62632 - RNA, 23 nt, Artificial Sequence
  Chemically synthesized
aacgaaagccaugaccacaugga

SEQ ID NO: 62633 - RNA, 23 nt, Artificial Sequence
  Chemically synthesized
caacgaaagccaugaccacaugg

SEQ ID NO: 62634 - RNA, 23 nt, Artificial Sequence
  Chemically synthesized
ccaacgaaagccaugaccacaug

SEQ ID NO: 62635 - RNA, 23 nt, Artificial Sequence
  Chemically synthesized
cauaccaguuaaacaggcugauu

SEQ ID NO: 62636 - RNA, 23 nt, Artificial Sequence
  Chemically synthesized
agaccccaaaaguaaggaagaag

SEQ ID NO: 62637 - RNA, 23 nt, Artificial Sequence
  Chemically synthesized
cacagccaugaagauaugcuggu

SEQ ID NO: 62638 - RNA, 23 nt, Artificial Sequence
  Chemically synthesized
gacgaggacaucaccucacacau

SEQ ID NO: 62639 - RNA, 23 nt, Artificial Sequence
  Chemically synthesized
agacgaggacaucaccucacaca

SEQ ID NO: 62640 - RNA, 23 nt, Artificial Sequence
  Chemically synthesized
cagacgaggacaucaccucacac

SEQ ID NO: 62641 - RNA, 23 nt, Artificial Sequence
  Chemically synthesized
acagacgaggacaucaccucaca

SEQ ID NO: 62642 - RNA, 23 nt, Artificial Sequence
  Chemically synthesized
ccgaaguuuucacuccaguuguc

SEQ ID NO: 62643 - RNA, 23 nt, Artificial Sequence
  Chemically synthesized
accgaaguuuucacuccaguugu

SEQ ID NO: 62644 - RNA, 23 nt, Artificial Sequence
  Chemically synthesized
aaccgaaguuuucacuccaguug

SEQ ID NO: 62645 - RNA, 23 nt, Artificial Sequence
  Chemically synthesized
caaccgaaguuuucacuccaguu

SEQ ID NO: 62646 - RNA, 23 nt, Artificial Sequence
  Chemically synthesized
gcaaccgaaguuuucacuccagu

SEQ ID NO: 62647 - RNA, 23 nt, Artificial Sequence
  Chemically synthesized
agcaaccgaaguuuucacuccag

SEQ ID NO: 62648 - RNA, 23 nt, Artificial Sequence
  Chemically synthesized
cagcaaccgaaguuuucacucca

SEQ ID NO: 62649 - RNA, 23 nt, Artificial Sequence
  Chemically synthesized
ccagcaaccgaaguuuucacucc

SEQ ID NO: 62650 - RNA, 23 nt, Artificial Sequence
  Chemically synthesized
ggacuccauugacucgaacgacu

SEQ ID NO: 62651 - RNA, 23 nt, Artificial Sequence
  Chemically synthesized
acagccaggacuccauugacucg

SEQ ID NO: 62652 - RNA, 23 nt, Artificial Sequence
  Chemically synthesized
gacagccaggacuccauugacuc

SEQ ID NO: 62653 - RNA, 23 nt, Artificial Sequence
  Chemically synthesized
ggacagccaggacuccauugacu

SEQ ID NO: 62654 - RNA, 23 nt, Artificial Sequence
  Chemically synthesized
uggacagccaggacuccauugac

SEQ ID NO: 62655 - RNA, 23 nt, Artificial Sequence
  Chemically synthesized
guggacagccaggacuccauuga

SEQ ID NO: 62656 - RNA, 23 nt, Artificial Sequence
  Chemically synthesized
gaugaagaugaugaugaccaugu

SEQ ID NO: 62657 - RNA, 23 nt, Artificial Sequence
  Chemically synthesized
uccaacgaaagccaugaccacau

SEQ ID NO: 62658 - RNA, 23 nt, Artificial Sequence
  Chemically synthesized
caugaaaugcuucuuucucaguu

SEQ ID NO: 62659 - RNA, 23 nt, Artificial Sequence
  Chemically synthesized
ccugaaauuucguauuucucaug

SEQ ID NO: 62660 - RNA, 23 nt, Artificial Sequence
  Chemically synthesized
accugaaauuucguauuucucau

SEQ ID NO: 62661 - RNA, 23 nt, Artificial Sequence
  Chemically synthesized
ucacagccaugaagauaugcugg

SEQ ID NO: 62662 - RNA, 23 nt, Artificial Sequence
  Chemically synthesized
uucacagccaugaagauaugcug

SEQ ID NO: 62663 - RNA, 23 nt, Artificial Sequence
  Chemically synthesized
uuucacagccaugaagauaugcu

SEQ ID NO: 62664 - RNA, 23 nt, Artificial Sequence
  Chemically synthesized
auuucacagccaugaagauaugc

SEQ ID NO: 62665 - RNA, 23 nt, Artificial Sequence
  Chemically synthesized
aauuucacagccaugaagauaug

SEQ ID NO: 62666 - RNA, 23 nt, Artificial Sequence
  Chemically synthesized
ugauagucaggaacuuuccaaag

SEQ ID NO: 62667 - RNA, 23 nt, Artificial Sequence
  Chemically synthesized
uugauagucaggaacuuuccaaa

SEQ ID NO: 62668 - RNA, 23 nt, Artificial Sequence
  Chemically synthesized
auugauagucaggaacuuuccaa

SEQ ID NO: 62669 - RNA, 23 nt, Artificial Sequence
  Chemically synthesized
gaauugcagugauuugcuuuugc

SEQ ID NO: 62670 - RNA, 23 nt, Artificial Sequence
  Chemically synthesized
agaauugcagugauuugcuuuug

SEQ ID NO: 62671 - RNA, 23 nt, Artificial Sequence
  Chemically synthesized
gagaauugcagugauuugcuuuu

SEQ ID NO: 62672 - RNA, 23 nt, Artificial Sequence
  Chemically synthesized
cuacagacgaggacaucaccuca

SEQ ID NO: 62673 - RNA, 23 nt, Artificial Sequence
  Chemically synthesized
gcuacagacgaggacaucaccuc

SEQ ID NO: 62674 - RNA, 23 nt, Artificial Sequence
  Chemically synthesized
ugcuacagacgaggacaucaccu

SEQ ID NO: 62675 - RNA, 23 nt, Artificial Sequence
  Chemically synthesized
ggaaaacucacuaccaugagaau

SEQ ID NO: 62676 - RNA, 23 nt, Artificial Sequence
  Chemically synthesized
aggaaaacucacuaccaugagaa

SEQ ID NO: 62677 - RNA, 23 nt, Artificial Sequence
  Chemically synthesized
cgaaguuuucacuccaguugucc

SEQ ID NO: 62678 - RNA, 23 nt, Artificial Sequence
  Chemically synthesized
ggaccugccagcaaccgaaguuu

SEQ ID NO: 62679 - RNA, 23 nt, Artificial Sequence
  Chemically synthesized
gucucaccauucugaugaaucug

SEQ ID NO: 62680 - RNA, 23 nt, Artificial Sequence
  Chemically synthesized
agucucaccauucugaugaaucu

SEQ ID NO: 62681 - RNA, 23 nt, Artificial Sequence
  Chemically synthesized
gagucucaccauucugaugaauc

SEQ ID NO: 62682 - RNA, 23 nt, Artificial Sequence
  Chemically synthesized
ucugaugagucucaccauucuga

SEQ ID NO: 62683 - RNA, 23 nt, Artificial Sequence
  Chemically synthesized
gucugaugagucucaccauucug

SEQ ID NO: 62684 - RNA, 23 nt, Artificial Sequence
  Chemically synthesized
agucugaugagucucaccauucu

SEQ ID NO: 62685 - RNA, 23 nt, Artificial Sequence
  Chemically synthesized
cagucugaugagucucaccauuc

SEQ ID NO: 62686 - RNA, 23 nt, Artificial Sequence
  Chemically synthesized
ccagucugaugagucucaccauu

SEQ ID NO: 62687 - RNA, 23 nt, Artificial Sequence
  Chemically synthesized
cuuuuuguggugugaauaaaucu

SEQ ID NO: 62688 - RNA, 23 nt, Artificial Sequence
  Chemically synthesized
ucuuuuuguggugugaauaaauc

SEQ ID NO: 62689 - RNA, 23 nt, Artificial Sequence
  Chemically synthesized
cacuuugcauuuagucaaaagaa

SEQ ID NO: 62690 - RNA, 23 nt, Artificial Sequence
  Chemically synthesized
gaauuagauagugcaucuucuga

SEQ ID NO: 62691 - RNA, 23 nt, Artificial Sequence
  Chemically synthesized
ugaauuagauagugcaucuucug

SEQ ID NO: 62692 - RNA, 23 nt, Artificial Sequence
  Chemically synthesized
augaauuagauagugcaucuucu

SEQ ID NO: 62693 - RNA, 23 nt, Artificial Sequence
  Chemically synthesized
caugaauuagauagugcaucuuc

SEQ ID NO: 62694 - RNA, 23 nt, Artificial Sequence
  Chemically synthesized
uauaagcggaaagccaaugauga

SEQ ID NO: 62695 - RNA, 23 nt, Artificial Sequence
  Chemically synthesized
auauaagcggaaagccaaugaug

SEQ ID NO: 62696 - RNA, 23 nt, Artificial Sequence
  Chemically synthesized
uauauaagcggaaagccaaugau

SEQ ID NO: 62697 - RNA, 23 nt, Artificial Sequence
  Chemically synthesized
ucagcuggaugaccagagugcug

SEQ ID NO: 62698 - RNA, 23 nt, Artificial Sequence
  Chemically synthesized
gucagcuggaugaccagagugcu

SEQ ID NO: 62699 - RNA, 23 nt, Artificial Sequence
  Chemically synthesized
agucagcuggaugaccagagugc

SEQ ID NO: 62700 - RNA, 23 nt, Artificial Sequence
  Chemically synthesized
gagucagcuggaugaccagagug

SEQ ID NO: 62701 - RNA, 23 nt, Artificial Sequence
  Chemically synthesized
cgagucagcuggaugaccagagu

SEQ ID NO: 62702 - RNA, 23 nt, Artificial Sequence
  Chemically synthesized
accagucugaugagucucaccau

SEQ ID NO: 62703 - RNA, 23 nt, Artificial Sequence
  Chemically synthesized
caccagucugaugagucucacca

SEQ ID NO: 62704 - RNA, 23 nt, Artificial Sequence
  Chemically synthesized
ucaccagucugaugagucucacc

SEQ ID NO: 62705 - RNA, 23 nt, Artificial Sequence
  Chemically synthesized
cucaccagucugaugagucucac

SEQ ID NO: 62706 - RNA, 23 nt, Artificial Sequence
  Chemically synthesized
aagccaugaccacauggaugaua

SEQ ID NO: 62707 - RNA, 23 nt, Artificial Sequence
  Chemically synthesized
aaagccaugaccacauggaugau

SEQ ID NO: 62708 - RNA, 23 nt, Artificial Sequence
  Chemically synthesized
gaaagccaugaccacauggauga

SEQ ID NO: 62709 - RNA, 23 nt, Artificial Sequence
  Chemically synthesized
ggcuucauggaaacucccuguaa

SEQ ID NO: 62710 - RNA, 23 nt, Artificial Sequence
  Chemically synthesized
uggcuucauggaaacucccugua

SEQ ID NO: 62711 - RNA, 23 nt, Artificial Sequence
  Chemically synthesized
ugaugagagcaaugagcauuccg

SEQ ID NO: 62712 - RNA, 23 nt, Artificial Sequence
  Chemically synthesized
augaugagagcaaugagcauucc

SEQ ID NO: 62713 - RNA, 23 nt, Artificial Sequence
  Chemically synthesized
aaugaugagagcaaugagcauuc

SEQ ID NO: 62714 - RNA, 23 nt, Artificial Sequence
  Chemically synthesized
caaugaugagagcaaugagcauu

SEQ ID NO: 62715 - RNA, 23 nt, Artificial Sequence
  Chemically synthesized
gaugaccagagugcugaaaccca

SEQ ID NO: 62716 - RNA, 23 nt, Artificial Sequence
  Chemically synthesized
ggaugaccagagugcugaaaccc

SEQ ID NO: 62717 - RNA, 23 nt, Artificial Sequence
  Chemically synthesized
uggaugaccagagugcugaaacc

SEQ ID NO: 62718 - RNA, 23 nt, Artificial Sequence
  Chemically synthesized
cuggaugaccagagugcugaaac

SEQ ID NO: 62719 - RNA, 23 nt, Artificial Sequence
  Chemically synthesized
gcuggaugaccagagugcugaaa

SEQ ID NO: 62720 - RNA, 23 nt, Artificial Sequence
  Chemically synthesized
guagacacauaugauggccgagg

SEQ ID NO: 62721 - RNA, 23 nt, Artificial Sequence
  Chemically synthesized
aguagacacauaugauggccgag

SEQ ID NO: 62722 - RNA, 23 nt, Artificial Sequence
  Chemically synthesized
caguagacacauaugauggccga

SEQ ID NO: 62723 - RNA, 23 nt, Artificial Sequence
  Chemically synthesized
guccaacgaaagccaugaccaca

SEQ ID NO: 62724 - RNA, 23 nt, Artificial Sequence
  Chemically synthesized
aguccaacgaaagccaugaccac

SEQ ID NO: 62725 - RNA, 23 nt, Artificial Sequence
  Chemically synthesized
aaguccaacgaaagccaugacca

SEQ ID NO: 62726 - RNA, 23 nt, Artificial Sequence
  Chemically synthesized
agcuggaugaccagagugcugaa

SEQ ID NO: 62727 - RNA, 23 nt, Artificial Sequence
  Chemically synthesized
ccucacacauggaaagcgaggag

SEQ ID NO: 62728 - RNA, 23 nt, Artificial Sequence
  Chemically synthesized
accucacacauggaaagcgagga

SEQ ID NO: 62729 - RNA, 23 nt, Artificial Sequence
  Chemically synthesized
caccucacacauggaaagcgagg

SEQ ID NO: 62730 - RNA, 23 nt, Artificial Sequence
  Chemically synthesized
ucaccucacacauggaaagcgag

SEQ ID NO: 62731 - RNA, 23 nt, Artificial Sequence
  Chemically synthesized
aucaccucacacauggaaagcga

SEQ ID NO: 62732 - RNA, 23 nt, Artificial Sequence
  Chemically synthesized
ccaguacccugaugcuacagacg

SEQ ID NO: 62733 - RNA, 23 nt, Artificial Sequence
  Chemically synthesized
uccaguacccugaugcuacagac

SEQ ID NO: 62734 - RNA, 23 nt, Artificial Sequence
  Chemically synthesized
auccaguacccugaugcuacaga

SEQ ID NO: 62735 - RNA, 23 nt, Artificial Sequence
  Chemically synthesized
cauccaguacccugaugcuacag

SEQ ID NO: 62736 - RNA, 23 nt, Artificial Sequence
  Chemically synthesized
acauccaguacccugaugcuaca

SEQ ID NO: 62737 - RNA, 23 nt, Artificial Sequence
  Chemically synthesized
uguccccacaguagacacauaug

SEQ ID NO: 62738 - RNA, 23 nt, Artificial Sequence
  Chemically synthesized
gaaguuuucacuccaguuguccc

SEQ ID NO: 62739 - RNA, 23 nt, Artificial Sequence
  Chemically synthesized
cagccaggacuccauugacucga

SEQ ID NO: 62740 - RNA, 23 nt, Artificial Sequence
  Chemically synthesized
aaacaggcugauucuggaaguuc

SEQ ID NO: 62741 - RNA, 23 nt, Artificial Sequence
  Chemically synthesized
uaaacaggcugauucuggaaguu

SEQ ID NO: 62742 - RNA, 23 nt, Artificial Sequence
  Chemically synthesized
gauuugcuuuugccuccuaggca

SEQ ID NO: 62743 - RNA, 23 nt, Artificial Sequence
  Chemically synthesized
ugauuugcuuuugccuccuaggc

SEQ ID NO: 62744 - RNA, 23 nt, Artificial Sequence
  Chemically synthesized
gugauuugcuuuugccuccuagg

SEQ ID NO: 62745 - RNA, 23 nt, Artificial Sequence
  Chemically synthesized
agugauuugcuuuugccuccuag

SEQ ID NO: 62746 - RNA, 23 nt, Artificial Sequence
  Chemically synthesized
cagugauuugcuuuugccuccua

SEQ ID NO: 62747 - RNA, 23 nt, Artificial Sequence
  Chemically synthesized
gaauuucacagccaugaagauau

SEQ ID NO: 62748 - RNA, 23 nt, Artificial Sequence
  Chemically synthesized
gaauuccacagccaugaauuuca

SEQ ID NO: 62749 - RNA, 23 nt, Artificial Sequence
  Chemically synthesized
ugaauuccacagccaugaauuuc

SEQ ID NO: 62750 - RNA, 23 nt, Artificial Sequence
  Chemically synthesized
gugaauuccacagccaugaauuu

SEQ ID NO: 62751 - RNA, 23 nt, Artificial Sequence
  Chemically synthesized
cgugaauuccacagccaugaauu

SEQ ID NO: 62752 - RNA, 23 nt, Artificial Sequence
  Chemically synthesized
ccgugaauuccacagccaugaau

SEQ ID NO: 62753 - RNA, 23 nt, Artificial Sequence
  Chemically synthesized
cucacacauggaaagcgaggagu

SEQ ID NO: 62754 - RNA, 23 nt, Artificial Sequence
  Chemically synthesized
ugaugauucucaccagucugaug

SEQ ID NO: 62755 - RNA, 23 nt, Artificial Sequence
  Chemically synthesized
cugaugauucucaccagucugau

SEQ ID NO: 62756 - RNA, 23 nt, Artificial Sequence
  Chemically synthesized
acugaugauucucaccagucuga

SEQ ID NO: 62757 - RNA, 23 nt, Artificial Sequence
  Chemically synthesized
cacugaugauucucaccagucug

SEQ ID NO: 62758 - RNA, 23 nt, Artificial Sequence
  Chemically synthesized
acacugaugauucucaccagucu

SEQ ID NO: 62759 - RNA, 23 nt, Artificial Sequence
  Chemically synthesized
gacacugaugauucucaccaguc

SEQ ID NO: 62760 - RNA, 23 nt, Artificial Sequence
  Chemically synthesized
ugacacugaugauucucaccagu

SEQ ID NO: 62761 - RNA, 23 nt, Artificial Sequence
  Chemically synthesized
augacacugaugauucucaccag

SEQ ID NO: 62762 - RNA, 23 nt, Artificial Sequence
  Chemically synthesized
gaugacacugaugauucucacca

SEQ ID NO: 62763 - RNA, 23 nt, Artificial Sequence
  Chemically synthesized
uaaguccaacgaaagccaugacc

SEQ ID NO: 62764 - RNA, 23 nt, Artificial Sequence
  Chemically synthesized
acuuuccaaagucagccgugaau

SEQ ID NO: 62765 - RNA, 23 nt, Artificial Sequence
  Chemically synthesized
agagugcugaaacccacagccac

SEQ ID NO: 62766 - RNA, 23 nt, Artificial Sequence
  Chemically synthesized
cagagugcugaaacccacagcca

SEQ ID NO: 62767 - RNA, 23 nt, Artificial Sequence
  Chemically synthesized
ccagagugcugaaacccacagcc

SEQ ID NO: 62768 - RNA, 23 nt, Artificial Sequence
  Chemically synthesized
accagagugcugaaacccacagc

SEQ ID NO: 62769 - RNA, 23 nt, Artificial Sequence
  Chemically synthesized
gaccagagugcugaaacccacag

SEQ ID NO: 62770 - RNA, 23 nt, Artificial Sequence
  Chemically synthesized
cucacuaccaugagaauugcagu

SEQ ID NO: 62771 - RNA, 23 nt, Artificial Sequence
  Chemically synthesized
acucacuaccaugagaauugcag

SEQ ID NO: 62772 - RNA, 23 nt, Artificial Sequence
  Chemically synthesized
aacucacuaccaugagaauugca

SEQ ID NO: 62773 - RNA, 23 nt, Artificial Sequence
  Chemically synthesized
aaacucacuaccaugagaauugc

SEQ ID NO: 62774 - RNA, 23 nt, Artificial Sequence
  Chemically synthesized
aaaacucacuaccaugagaauug

SEQ ID NO: 62775 - RNA, 23 nt, Artificial Sequence
  Chemically synthesized
ucucaccagucugaugagucuca

SEQ ID NO: 62776 - RNA, 23 nt, Artificial Sequence
  Chemically synthesized
uucucaccagucugaugagucuc

SEQ ID NO: 62777 - RNA, 23 nt, Artificial Sequence
  Chemically synthesized
auucucaccagucugaugagucu

SEQ ID NO: 62778 - RNA, 23 nt, Artificial Sequence
  Chemically synthesized
uuauuuguuuucccacgguuguc

SEQ ID NO: 62779 - RNA, 23 nt, Artificial Sequence
  Chemically synthesized
cuuauuuguuuucccacgguugu

SEQ ID NO: 62780 - RNA, 23 nt, Artificial Sequence
  Chemically synthesized
gcuuauuuguuuucccacgguug

SEQ ID NO: 62781 - RNA, 23 nt, Artificial Sequence
  Chemically synthesized
ugcuuauuuguuuucccacgguu

SEQ ID NO: 62782 - RNA, 23 nt, Artificial Sequence
  Chemically synthesized
uugcuuauuuguuuucccacggu

SEQ ID NO: 62783 - RNA, 23 nt, Artificial Sequence
  Chemically synthesized
gcagugauuugcuuuugccuccu

SEQ ID NO: 62784 - RNA, 23 nt, Artificial Sequence
  Chemically synthesized
ugcagugauuugcuuuugccucc

SEQ ID NO: 62785 - RNA, 23 nt, Artificial Sequence
  Chemically synthesized
uugcagugauuugcuuuugccuc

SEQ ID NO: 62786 - RNA, 23 nt, Artificial Sequence
  Chemically synthesized
auugcagugauuugcuuuugccu

SEQ ID NO: 62787 - RNA, 23 nt, Artificial Sequence
  Chemically synthesized
aauugcagugauuugcuuuugcc

SEQ ID NO: 62788 - RNA, 23 nt, Artificial Sequence
  Chemically synthesized
cugaaacccacagccacaagcag

SEQ ID NO: 62789 - RNA, 23 nt, Artificial Sequence
  Chemically synthesized
gcugaaacccacagccacaagca

SEQ ID NO: 62790 - RNA, 23 nt, Artificial Sequence
  Chemically synthesized
ugcugaaacccacagccacaagc

SEQ ID NO: 62791 - RNA, 23 nt, Artificial Sequence
  Chemically synthesized
gugcugaaacccacagccacaag

SEQ ID NO: 62792 - RNA, 23 nt, Artificial Sequence
  Chemically synthesized
agugcugaaacccacagccacaa

SEQ ID NO: 62793 - RNA, 23 nt, Artificial Sequence
  Chemically synthesized
guacccugaugcuacagacgagg

SEQ ID NO: 62794 - RNA, 23 nt, Artificial Sequence
  Chemically synthesized
aguacccugaugcuacagacgag

SEQ ID NO: 62795 - RNA, 23 nt, Artificial Sequence
  Chemically synthesized
caguacccugaugcuacagacga

SEQ ID NO: 62796 - RNA, 23 nt, Artificial Sequence
  Chemically synthesized
ugacauccaguacccugaugcua

SEQ ID NO: 62797 - RNA, 23 nt, Artificial Sequence
  Chemically synthesized
cugacauccaguacccugaugcu

SEQ ID NO: 62798 - RNA, 23 nt, Artificial Sequence
  Chemically synthesized
ccugacauccaguacccugaugc

SEQ ID NO: 62799 - RNA, 23 nt, Artificial Sequence
  Chemically synthesized
accugacauccaguacccugaug

SEQ ID NO: 62800 - RNA, 23 nt, Artificial Sequence
  Chemically synthesized
gaccugacauccaguacccugau

SEQ ID NO: 62801 - RNA, 23 nt, Artificial Sequence
  Chemically synthesized
ugauucucaccagucugaugagu

SEQ ID NO: 62802 - RNA, 23 nt, Artificial Sequence
  Chemically synthesized
augauucucaccagucugaugag

SEQ ID NO: 62803 - RNA, 23 nt, Artificial Sequence
  Chemically synthesized
gaugauucucaccagucugauga

SEQ ID NO: 62804 - RNA, 23 nt, Artificial Sequence
  Chemically synthesized
auugacucgaacgacucugauga

SEQ ID NO: 62805 - RNA, 23 nt, Artificial Sequence
  Chemically synthesized
cauugacucgaacgacucugaug

SEQ ID NO: 62806 - RNA, 23 nt, Artificial Sequence
  Chemically synthesized
ccauugacucgaacgacucugau

SEQ ID NO: 62807 - RNA, 23 nt, Artificial Sequence
  Chemically synthesized
uuaaacaggcugauucuggaagu

SEQ ID NO: 62808 - RNA, 23 nt, Artificial Sequence
  Chemically synthesized
ccacagccaugaauuucacagcc

SEQ ID NO: 62809 - RNA, 23 nt, Artificial Sequence
  Chemically synthesized
uccacagccaugaauuucacagc

SEQ ID NO: 62810 - RNA, 23 nt, Artificial Sequence
  Chemically synthesized
uuccacagccaugaauuucacag

SEQ ID NO: 62811 - RNA, 23 nt, Artificial Sequence
  Chemically synthesized
gccgugaauuccacagccaugaa

SEQ ID NO: 62812 - RNA, 23 nt, Artificial Sequence
  Chemically synthesized
gacauccaguacccugaugcuac

SEQ ID NO: 62813 - RNA, 23 nt, Artificial Sequence
  Chemically synthesized
ucacugauuuucccacggaccug

SEQ ID NO: 62814 - RNA, 23 nt, Artificial Sequence
  Chemically synthesized
gucacugauuuucccacggaccu

SEQ ID NO: 62815 - RNA, 23 nt, Artificial Sequence
  Chemically synthesized
ggucacugauuuucccacggacc

SEQ ID NO: 62816 - RNA, 23 nt, Artificial Sequence
  Chemically synthesized
uggucacugauuuucccacggac

SEQ ID NO: 62817 - RNA, 23 nt, Artificial Sequence
  Chemically synthesized
cuggucacugauuuucccacgga

SEQ ID NO: 62818 - RNA, 23 nt, Artificial Sequence
  Chemically synthesized
uccauugacucgaacgacucuga

SEQ ID NO: 62819 - RNA, 23 nt, Artificial Sequence
  Chemically synthesized
cuccauugacucgaacgacucug

SEQ ID NO: 62820 - RNA, 23 nt, Artificial Sequence
  Chemically synthesized
acuccauugacucgaacgacucu

SEQ ID NO: 62821 - RNA, 23 nt, Artificial Sequence
  Chemically synthesized
gacuccauugacucgaacgacuc

SEQ ID NO: 62822 - RNA, 23 nt, Artificial Sequence
  Chemically synthesized
guuauucucucaugaauagaaau

SEQ ID NO: 62823 - RNA, 23 nt, Artificial Sequence
  Chemically synthesized
uguuauucucucaugaauagaaa

SEQ ID NO: 62824 - RNA, 23 nt, Artificial Sequence
  Chemically synthesized
uuguuauucucucaugaauagaa

SEQ ID NO: 62825 - RNA, 23 nt, Artificial Sequence
  Chemically synthesized
uuuguuauucucucaugaauaga

SEQ ID NO: 62826 - RNA, 23 nt, Artificial Sequence
  Chemically synthesized
auuuguuauucucucaugaauag

SEQ ID NO: 62827 - RNA, 23 nt, Artificial Sequence
  Chemically synthesized
gcuuuugccuccuaggcaucacc

SEQ ID NO: 62828 - RNA, 23 nt, Artificial Sequence
  Chemically synthesized
ugcuuuugccuccuaggcaucac

SEQ ID NO: 62829 - RNA, 23 nt, Artificial Sequence
  Chemically synthesized
uugcuuuugccuccuaggcauca

SEQ ID NO: 62830 - RNA, 23 nt, Artificial Sequence
  Chemically synthesized
uuugcuuuugccuccuaggcauc

SEQ ID NO: 62831 - RNA, 23 nt, Artificial Sequence
  Chemically synthesized
auuugcuuuugccuccuaggcau

SEQ ID NO: 62832 - RNA, 23 nt, Artificial Sequence
  Chemically synthesized
cuuugcauuuagucaaaagaaaa

SEQ ID NO: 62833 - RNA, 23 nt, Artificial Sequence
  Chemically synthesized
acuuugcauuuagucaaaagaaa

SEQ ID NO: 62834 - RNA, 23 nt, Artificial Sequence
  Chemically synthesized
agccgugaauuccacagccauga

SEQ ID NO: 62835 - RNA, 23 nt, Artificial Sequence
  Chemically synthesized
cagccgugaauuccacagccaug

SEQ ID NO: 62836 - RNA, 23 nt, Artificial Sequence
  Chemically synthesized
ucagccgugaauuccacagccau

SEQ ID NO: 62837 - RNA, 23 nt, Artificial Sequence
  Chemically synthesized
cagccgugggaaggacaguuaug

SEQ ID NO: 62838 - RNA, 23 nt, Artificial Sequence
  Chemically synthesized
acagccgugggaaggacaguuau

SEQ ID NO: 62839 - RNA, 23 nt, Artificial Sequence
  Chemically synthesized
guggcuucauggaaacucccugu

SEQ ID NO: 62840 - RNA, 23 nt, Artificial Sequence
  Chemically synthesized
uguggcuucauggaaacucccug

SEQ ID NO: 62841 - RNA, 23 nt, Artificial Sequence
  Chemically synthesized
uuguggcuucauggaaacucccu

SEQ ID NO: 62842 - RNA, 23 nt, Artificial Sequence
  Chemically synthesized
aggaugucugcagcagcauuuaa

SEQ ID NO: 62843 - RNA, 23 nt, Artificial Sequence
  Chemically synthesized
gaggaugucugcagcagcauuua

SEQ ID NO: 62844 - RNA, 23 nt, Artificial Sequence
  Chemically synthesized
ggaggaugucugcagcagcauuu

SEQ ID NO: 62845 - RNA, 23 nt, Artificial Sequence
  Chemically synthesized
uggaggaugucugcagcagcauu

SEQ ID NO: 62846 - RNA, 23 nt, Artificial Sequence
  Chemically synthesized
cacugauuuucccacggaccugc

SEQ ID NO: 62847 - RNA, 23 nt, Artificial Sequence
  Chemically synthesized
ugcagccuucucagccaaacgcc

SEQ ID NO: 62848 - RNA, 23 nt, Artificial Sequence
  Chemically synthesized
uugcagccuucucagccaaacgc

SEQ ID NO: 62849 - RNA, 23 nt, Artificial Sequence
  Chemically synthesized
guugcagccuucucagccaaacg

SEQ ID NO: 62850 - RNA, 23 nt, Artificial Sequence
  Chemically synthesized
aguugcagccuucucagccaaac

SEQ ID NO: 62851 - RNA, 23 nt, Artificial Sequence
  Chemically synthesized
caguugcagccuucucagccaaa

SEQ ID NO: 62852 - RNA, 23 nt, Artificial Sequence
  Chemically synthesized
auugcuuauuuguuuucccacgg

SEQ ID NO: 62853 - RNA, 23 nt, Artificial Sequence
  Chemically synthesized
aauugcuuauuuguuuucccacg

SEQ ID NO: 62854 - RNA, 23 nt, Artificial Sequence
  Chemically synthesized
gaaaacucacuaccaugagaauu

SEQ ID NO: 62855 - RNA, 23 nt, Artificial Sequence
  Chemically synthesized
ugaauuucacagccaugaagaua

SEQ ID NO: 62856 - RNA, 23 nt, Artificial Sequence
  Chemically synthesized
augaauuucacagccaugaagau

SEQ ID NO: 62857 - RNA, 23 nt, Artificial Sequence
  Chemically synthesized
caugaauuucacagccaugaaga

SEQ ID NO: 62858 - RNA, 23 nt, Artificial Sequence
  Chemically synthesized
gguuuauggacugaggucaaaau

SEQ ID NO: 62859 - RNA, 23 nt, Artificial Sequence
  Chemically synthesized
ugguuuauggacugaggucaaaa

SEQ ID NO: 62860 - RNA, 23 nt, Artificial Sequence
  Chemically synthesized
gugguuuauggacugaggucaaa

SEQ ID NO: 62861 - RNA, 23 nt, Artificial Sequence
  Chemically synthesized
ugugguuuauggacugaggucaa

SEQ ID NO: 62862 - RNA, 23 nt, Artificial Sequence
  Chemically synthesized
acaugaaaugcuucuuucucagu

SEQ ID NO: 62863 - RNA, 23 nt, Artificial Sequence
  Chemically synthesized
aacaugaaaugcuucuuucucag

SEQ ID NO: 62864 - RNA, 23 nt, Artificial Sequence
  Chemically synthesized
auuccacagccaugaauuucaca

SEQ ID NO: 62865 - RNA, 23 nt, Artificial Sequence
  Chemically synthesized
aauuccacagccaugaauuucac

SEQ ID NO: 62866 - RNA, 23 nt, Artificial Sequence
  Chemically synthesized
ccacagccacaagcaguccagau

SEQ ID NO: 62867 - RNA, 23 nt, Artificial Sequence
  Chemically synthesized
caaaaucuaagaaguuucgcaga

SEQ ID NO: 62868 - RNA, 23 nt, Artificial Sequence
  Chemically synthesized
ucaaaaucuaagaaguuucgcag

SEQ ID NO: 62869 - RNA, 23 nt, Artificial Sequence
  Chemically synthesized
gucaaaaucuaagaaguuucgca

SEQ ID NO: 62870 - RNA, 23 nt, Artificial Sequence
  Chemically synthesized
aggcaucaccugugccauaccag

SEQ ID NO: 62871 - RNA, 23 nt, Artificial Sequence
  Chemically synthesized
uaggcaucaccugugccauacca

SEQ ID NO: 62872 - RNA, 23 nt, Artificial Sequence
  Chemically synthesized
cuaggcaucaccugugccauacc

SEQ ID NO: 62873 - RNA, 23 nt, Artificial Sequence
  Chemically synthesized
ccuaggcaucaccugugccauac

SEQ ID NO: 62874 - RNA, 23 nt, Artificial Sequence
  Chemically synthesized
uccuaggcaucaccugugccaua

SEQ ID NO: 62875 - RNA, 23 nt, Artificial Sequence
  Chemically synthesized
agauagugcaucuucugagguca

SEQ ID NO: 62876 - RNA, 23 nt, Artificial Sequence
  Chemically synthesized
uagauagugcaucuucugagguc

SEQ ID NO: 62877 - RNA, 23 nt, Artificial Sequence
  Chemically synthesized
uuagauagugcaucuucugaggu

SEQ ID NO: 62878 - RNA, 23 nt, Artificial Sequence
  Chemically synthesized
auuagauagugcaucuucugagg

SEQ ID NO: 62879 - RNA, 23 nt, Artificial Sequence
  Chemically synthesized
aauuagauagugcaucuucugag

SEQ ID NO: 62880 - RNA, 23 nt, Artificial Sequence
  Chemically synthesized
gugccauaccaguuaaacaggcu

SEQ ID NO: 62881 - RNA, 23 nt, Artificial Sequence
  Chemically synthesized
ugugccauaccaguuaaacaggc

SEQ ID NO: 62882 - RNA, 23 nt, Artificial Sequence
  Chemically synthesized
cugugccauaccaguuaaacagg

SEQ ID NO: 62883 - RNA, 23 nt, Artificial Sequence
  Chemically synthesized
ccugugccauaccaguuaaacag

SEQ ID NO: 62884 - RNA, 23 nt, Artificial Sequence
  Chemically synthesized
accugugccauaccaguuaaaca

SEQ ID NO: 62885 - RNA, 23 nt, Artificial Sequence
  Chemically synthesized
ccagcaauuaauaaaacauaacc

SEQ ID NO: 62886 - RNA, 23 nt, Artificial Sequence
  Chemically synthesized
agaaguuucgcagaccugacauc

SEQ ID NO: 62887 - RNA, 23 nt, Artificial Sequence
  Chemically synthesized
gugucaauugcuuauuuguuuuc

SEQ ID NO: 62888 - RNA, 23 nt, Artificial Sequence
  Chemically synthesized
uaauaagaauuugguggugucaa

SEQ ID NO: 62889 - RNA, 23 nt, Artificial Sequence
  Chemically synthesized
ucaauugcuuauuuguuuuccca

SEQ ID NO: 62890 - RNA, 23 nt, Artificial Sequence
  Chemically synthesized
caauugcuuauuuguuuucccac

SEQ ID NO: 62891 - RNA, 23 nt, Artificial Sequence
  Chemically synthesized
ugauaauuaguuuaguuuguggc

SEQ ID NO: 62892 - RNA, 23 nt, Artificial Sequence
  Chemically synthesized
ugauagugugguuuauggacuga

SEQ ID NO: 62893 - RNA, 23 nt, Artificial Sequence
  Chemically synthesized
aguuuaguuuguggcuucaugga

SEQ ID NO: 62894 - RNA, 23 nt, Artificial Sequence
  Chemically synthesized
uguaaacuaaaagcuucaggguu

SEQ ID NO: 62895 - RNA, 23 nt, Artificial Sequence
  Chemically synthesized
gcuuuauagcaaaaugaaagaga

SEQ ID NO: 62896 - RNA, 23 nt, Artificial Sequence
  Chemically synthesized
ugcuuuauagcaaaaugaaagag

SEQ ID NO: 62897 - RNA, 23 nt, Artificial Sequence
  Chemically synthesized
gcaucaccugugccauaccaguu

SEQ ID NO: 62898 - RNA, 23 nt, Artificial Sequence
  Chemically synthesized
cugaaauuucguauuucucauga

SEQ ID NO: 62899 - RNA, 23 nt, Artificial Sequence
  Chemically synthesized
ugucuauguucauucuauagaag

SEQ ID NO: 62900 - RNA, 23 nt, Artificial Sequence
  Chemically synthesized
ucacuaccaugagaauugcagug

SEQ ID NO: 62901 - RNA, 23 nt, Artificial Sequence
  Chemically synthesized
ugaauggugcauacaaggccauc

SEQ ID NO: 62902 - RNA, 23 nt, Artificial Sequence
  Chemically synthesized
uugaauggugcauacaaggccau

SEQ ID NO: 62903 - RNA, 23 nt, Artificial Sequence
  Chemically synthesized
gucuauguucauucuauagaaga

SEQ ID NO: 62904 - RNA, 23 nt, Artificial Sequence
  Chemically synthesized
ggagaaaaaauacaauuucucac

SEQ ID NO: 62905 - RNA, 23 nt, Artificial Sequence
  Chemically synthesized
agcaaacaaaauacuuuuaccca

SEQ ID NO: 62906 - RNA, 23 nt, Artificial Sequence
  Chemically synthesized
cguauuucucaugaauuagauag

SEQ ID NO: 62907 - RNA, 23 nt, Artificial Sequence
  Chemically synthesized
ggaacuuuccaaagucagccgug

SEQ ID NO: 62908 - RNA, 23 nt, Artificial Sequence
  Chemically synthesized
aggaacuuuccaaagucagccgu

SEQ ID NO: 62909 - RNA, 23 nt, Artificial Sequence
  Chemically synthesized
gaacuuuccaaagucagccguga

SEQ ID NO: 62910 - RNA, 23 nt, Artificial Sequence
  Chemically synthesized
uuucauguucucuuucauuuugc

SEQ ID NO: 62911 - RNA, 23 nt, Artificial Sequence
  Chemically synthesized
uucauguucucuuucauuuugcu

SEQ ID NO: 62912 - RNA, 23 nt, Artificial Sequence
  Chemically synthesized
ucauguucucuuucauuuugcua

SEQ ID NO: 62913 - RNA, 23 nt, Artificial Sequence
  Chemically synthesized
cauguucucuuucauuuugcuau

SEQ ID NO: 62914 - RNA, 23 nt, Artificial Sequence
  Chemically synthesized
auguucucuuucauuuugcuaua

SEQ ID NO: 62915 - RNA, 23 nt, Artificial Sequence
  Chemically synthesized
uggcuuucguuggacuuacuugg

SEQ ID NO: 62916 - RNA, 23 nt, Artificial Sequence
  Chemically synthesized
ggcuuucguuggacuuacuugga

SEQ ID NO: 62917 - RNA, 23 nt, Artificial Sequence
  Chemically synthesized
gcuuucguuggacuuacuuggaa

SEQ ID NO: 62918 - RNA, 23 nt, Artificial Sequence
  Chemically synthesized
cuuucguuggacuuacuuggaag

SEQ ID NO: 62919 - RNA, 23 nt, Artificial Sequence
  Chemically synthesized
uuucguuggacuuacuuggaagg

SEQ ID NO: 62920 - RNA, 23 nt, Artificial Sequence
  Chemically synthesized
auuaaaauacagugauaguuugc

SEQ ID NO: 62921 - RNA, 23 nt, Artificial Sequence
  Chemically synthesized
uuaaaauacagugauaguuugca

SEQ ID NO: 62922 - RNA, 23 nt, Artificial Sequence
  Chemically synthesized
uaaaauacagugauaguuugcau

SEQ ID NO: 62923 - RNA, 23 nt, Artificial Sequence
  Chemically synthesized
aaaauacagugauaguuugcauu

SEQ ID NO: 62924 - RNA, 23 nt, Artificial Sequence
  Chemically synthesized
aaauacagugauaguuugcauuu

SEQ ID NO: 62925 - RNA, 23 nt, Artificial Sequence
  Chemically synthesized
agacauaacccugaagcuuuuag

SEQ ID NO: 62926 - RNA, 23 nt, Artificial Sequence
  Chemically synthesized
gacauaacccugaagcuuuuagu

SEQ ID NO: 62927 - RNA, 23 nt, Artificial Sequence
  Chemically synthesized
acauaacccugaagcuuuuaguu

SEQ ID NO: 62928 - RNA, 23 nt, Artificial Sequence
  Chemically synthesized
cauaacccugaagcuuuuaguuu

SEQ ID NO: 62929 - RNA, 23 nt, Artificial Sequence
  Chemically synthesized
auaacccugaagcuuuuaguuua

SEQ ID NO: 62930 - RNA, 23 nt, Artificial Sequence
  Chemically synthesized
gaaauuucagguguuuaucuucu

SEQ ID NO: 62931 - RNA, 23 nt, Artificial Sequence
  Chemically synthesized
aaauuucagguguuuaucuucuu

SEQ ID NO: 62932 - RNA, 23 nt, Artificial Sequence
  Chemically synthesized
aauuucagguguuuaucuucuuc

SEQ ID NO: 62933 - RNA, 23 nt, Artificial Sequence
  Chemically synthesized
auuucagguguuuaucuucuucc

SEQ ID NO: 62934 - RNA, 23 nt, Artificial Sequence
  Chemically synthesized
uuucagguguuuaucuucuuccu

SEQ ID NO: 62935 - RNA, 23 nt, Artificial Sequence
  Chemically synthesized
ugagaaauacgaaauuucaggug

SEQ ID NO: 62936 - RNA, 23 nt, Artificial Sequence
  Chemically synthesized
gagaaauacgaaauuucaggugu

SEQ ID NO: 62937 - RNA, 23 nt, Artificial Sequence
  Chemically synthesized
agaaauacgaaauuucagguguu

SEQ ID NO: 62938 - RNA, 23 nt, Artificial Sequence
  Chemically synthesized
gaaauacgaaauuucagguguuu

SEQ ID NO: 62939 - RNA, 23 nt, Artificial Sequence
  Chemically synthesized
aaauacgaaauuucagguguuua

SEQ ID NO: 62940 - RNA, 23 nt, Artificial Sequence
  Chemically synthesized
aauacgaaauuucagguguuuau

SEQ ID NO: 62941 - RNA, 23 nt, Artificial Sequence
  Chemically synthesized
ugucaucuacaucaucagagucg

SEQ ID NO: 62942 - RNA, 23 nt, Artificial Sequence
  Chemically synthesized
gucaucuacaucaucagagucgu

SEQ ID NO: 62943 - RNA, 23 nt, Artificial Sequence
  Chemically synthesized
ucaucuacaucaucagagucguu

SEQ ID NO: 62944 - RNA, 23 nt, Artificial Sequence
  Chemically synthesized
caucuacaucaucagagucguuc

SEQ ID NO: 62945 - RNA, 23 nt, Artificial Sequence
  Chemically synthesized
aucuacaucaucagagucguucg

SEQ ID NO: 62946 - RNA, 23 nt, Artificial Sequence
  Chemically synthesized
uuauguuuuauuaauugcuggac

SEQ ID NO: 62947 - RNA, 23 nt, Artificial Sequence
  Chemically synthesized
uauguuuuauuaauugcuggaca

SEQ ID NO: 62948 - RNA, 23 nt, Artificial Sequence
  Chemically synthesized
auguuuuauuaauugcuggacaa

SEQ ID NO: 62949 - RNA, 23 nt, Artificial Sequence
  Chemically synthesized
uguuuuauuaauugcuggacaac

SEQ ID NO: 62950 - RNA, 23 nt, Artificial Sequence
  Chemically synthesized
guuuuauuaauugcuggacaacc

SEQ ID NO: 62951 - RNA, 23 nt, Artificial Sequence
  Chemically synthesized
aaacaaauaagcaauugacacca

SEQ ID NO: 62952 - RNA, 23 nt, Artificial Sequence
  Chemically synthesized
aacaaauaagcaauugacaccac

SEQ ID NO: 62953 - RNA, 23 nt, Artificial Sequence
  Chemically synthesized
acaaauaagcaauugacaccacc

SEQ ID NO: 62954 - RNA, 23 nt, Artificial Sequence
  Chemically synthesized
caaauaagcaauugacaccacca

SEQ ID NO: 62955 - RNA, 23 nt, Artificial Sequence
  Chemically synthesized
aaauaagcaauugacaccaccaa

SEQ ID NO: 62956 - RNA, 23 nt, Artificial Sequence
  Chemically synthesized
uaacccugaagcuuuuaguuuac

SEQ ID NO: 62957 - RNA, 23 nt, Artificial Sequence
  Chemically synthesized
gcuuuuaguuuacagggaguuuc

SEQ ID NO: 62958 - RNA, 23 nt, Artificial Sequence
  Chemically synthesized
cuuuuaguuuacagggaguuucc

SEQ ID NO: 62959 - RNA, 23 nt, Artificial Sequence
  Chemically synthesized
uuuuaguuuacagggaguuucca

SEQ ID NO: 62960 - RNA, 23 nt, Artificial Sequence
  Chemically synthesized
uuuaguuuacagggaguuuccau

SEQ ID NO: 62961 - RNA, 23 nt, Artificial Sequence
  Chemically synthesized
uuaguuuacagggaguuuccaug

SEQ ID NO: 62962 - RNA, 23 nt, Artificial Sequence
  Chemically synthesized
uaguuuacagggaguuuccauga

SEQ ID NO: 62963 - RNA, 23 nt, Artificial Sequence
  Chemically synthesized
cucaaauagauacacauucaacc

SEQ ID NO: 62964 - RNA, 23 nt, Artificial Sequence
  Chemically synthesized
ucaaauagauacacauucaacca

SEQ ID NO: 62965 - RNA, 23 nt, Artificial Sequence
  Chemically synthesized
caaauagauacacauucaaccaa

SEQ ID NO: 62966 - RNA, 23 nt, Artificial Sequence
  Chemically synthesized
aaauagauacacauucaaccaau

SEQ ID NO: 62967 - RNA, 23 nt, Artificial Sequence
  Chemically synthesized
aauagauacacauucaaccaaua

SEQ ID NO: 62968 - RNA, 23 nt, Artificial Sequence
  Chemically synthesized
cgaaauuucagguguuuaucuuc

SEQ ID NO: 62969 - RNA, 23 nt, Artificial Sequence
  Chemically synthesized
uucagguguuuaucuucuuccuu

SEQ ID NO: 62970 - RNA, 23 nt, Artificial Sequence
  Chemically synthesized
ucagguguuuaucuucuuccuua

SEQ ID NO: 62971 - RNA, 23 nt, Artificial Sequence
  Chemically synthesized
cagguguuuaucuucuuccuuac

SEQ ID NO: 62972 - RNA, 23 nt, Artificial Sequence
  Chemically synthesized
uuuaucuucuuccuuacuuuugg

SEQ ID NO: 62973 - RNA, 23 nt, Artificial Sequence
  Chemically synthesized
uuaucuucuuccuuacuuuuggg

SEQ ID NO: 62974 - RNA, 23 nt, Artificial Sequence
  Chemically synthesized
uaucuucuuccuuacuuuugggg

SEQ ID NO: 62975 - RNA, 23 nt, Artificial Sequence
  Chemically synthesized
aucuucuuccuuacuuuuggggu

SEQ ID NO: 62976 - RNA, 23 nt, Artificial Sequence
  Chemically synthesized
ucuucuuccuuacuuuugggguc

SEQ ID NO: 62977 - RNA, 23 nt, Artificial Sequence
  Chemically synthesized
augcucauugcucucaucauugg

SEQ ID NO: 62978 - RNA, 23 nt, Artificial Sequence
  Chemically synthesized
ugcucauugcucucaucauuggc

SEQ ID NO: 62979 - RNA, 23 nt, Artificial Sequence
  Chemically synthesized
gcucauugcucucaucauuggcu

SEQ ID NO: 62980 - RNA, 23 nt, Artificial Sequence
  Chemically synthesized
cucauugcucucaucauuggcuu

SEQ ID NO: 62981 - RNA, 23 nt, Artificial Sequence
  Chemically synthesized
ucauugcucucaucauuggcuuu

SEQ ID NO: 62982 - RNA, 23 nt, Artificial Sequence
  Chemically synthesized
aaucaucagugucaucuacauca

SEQ ID NO: 62983 - RNA, 23 nt, Artificial Sequence
  Chemically synthesized
aucaucagugucaucuacaucau

SEQ ID NO: 62984 - RNA, 23 nt, Artificial Sequence
  Chemically synthesized
ucaucagugucaucuacaucauc

SEQ ID NO: 62985 - RNA, 23 nt, Artificial Sequence
  Chemically synthesized
caucagugucaucuacaucauca

SEQ ID NO: 62986 - RNA, 23 nt, Artificial Sequence
  Chemically synthesized
aucagugucaucuacaucaucag

SEQ ID NO: 62987 - RNA, 23 nt, Artificial Sequence
  Chemically synthesized
agcaauugacaccaccaaauucu

SEQ ID NO: 62988 - RNA, 23 nt, Artificial Sequence
  Chemically synthesized
gcaauugacaccaccaaauucuu

SEQ ID NO: 62989 - RNA, 23 nt, Artificial Sequence
  Chemically synthesized
caauugacaccaccaaauucuua

SEQ ID NO: 62990 - RNA, 23 nt, Artificial Sequence
  Chemically synthesized
aauugacaccaccaaauucuuau

SEQ ID NO: 62991 - RNA, 23 nt, Artificial Sequence
  Chemically synthesized
auugacaccaccaaauucuuauu

SEQ ID NO: 62992 - RNA, 23 nt, Artificial Sequence
  Chemically synthesized
cugaagcuuuuaguuuacaggga

SEQ ID NO: 62993 - RNA, 23 nt, Artificial Sequence
  Chemically synthesized
ugaagcuuuuaguuuacagggag

SEQ ID NO: 62994 - RNA, 23 nt, Artificial Sequence
  Chemically synthesized
gaagcuuuuaguuuacagggagu

SEQ ID NO: 62995 - RNA, 23 nt, Artificial Sequence
  Chemically synthesized
aagcuuuuaguuuacagggaguu

SEQ ID NO: 62996 - RNA, 23 nt, Artificial Sequence
  Chemically synthesized
agcuuuuaguuuacagggaguuu

SEQ ID NO: 62997 - RNA, 23 nt, Artificial Sequence
  Chemically synthesized
gacuaucaaucacaucggaaugc

SEQ ID NO: 62998 - RNA, 23 nt, Artificial Sequence
  Chemically synthesized
acuaucaaucacaucggaaugcu

SEQ ID NO: 62999 - RNA, 23 nt, Artificial Sequence
  Chemically synthesized
cuaucaaucacaucggaaugcuc

SEQ ID NO: 63000 - RNA, 23 nt, Artificial Sequence
  Chemically synthesized
uaucaaucacaucggaaugcuca

SEQ ID NO: 63001 - RNA, 23 nt, Artificial Sequence
  Chemically synthesized
aucaaucacaucggaaugcucau

SEQ ID NO: 63002 - RNA, 23 nt, Artificial Sequence
  Chemically synthesized
ggcuuuccgcuuauauaaucugg

SEQ ID NO: 63003 - RNA, 23 nt, Artificial Sequence
  Chemically synthesized
gcuuuccgcuuauauaaucugga

SEQ ID NO: 63004 - RNA, 23 nt, Artificial Sequence
  Chemically synthesized
cuuuccgcuuauauaaucuggac

SEQ ID NO: 63005 - RNA, 23 nt, Artificial Sequence
  Chemically synthesized
uuuccgcuuauauaaucuggacu

SEQ ID NO: 63006 - RNA, 23 nt, Artificial Sequence
  Chemically synthesized
uuccgcuuauauaaucuggacug

SEQ ID NO: 63007 - RNA, 23 nt, Artificial Sequence
  Chemically synthesized
gcaaaucacugcaauucucaugg

SEQ ID NO: 63008 - RNA, 23 nt, Artificial Sequence
  Chemically synthesized
caaaucacugcaauucucauggu

SEQ ID NO: 63009 - RNA, 23 nt, Artificial Sequence
  Chemically synthesized
aaaucacugcaauucucauggua

SEQ ID NO: 63010 - RNA, 23 nt, Artificial Sequence
  Chemically synthesized
aaucacugcaauucucaugguag

SEQ ID NO: 63011 - RNA, 23 nt, Artificial Sequence
  Chemically synthesized
aucacugcaauucucaugguagu

SEQ ID NO: 63012 - RNA, 23 nt, Artificial Sequence
  Chemically synthesized
ugaccaguucaucagauucauca

SEQ ID NO: 63013 - RNA, 23 nt, Artificial Sequence
  Chemically synthesized
gaccaguucaucagauucaucag

SEQ ID NO: 63014 - RNA, 23 nt, Artificial Sequence
  Chemically synthesized
accaguucaucagauucaucaga

SEQ ID NO: 63015 - RNA, 23 nt, Artificial Sequence
  Chemically synthesized
ccaguucaucagauucaucagaa

SEQ ID NO: 63016 - RNA, 23 nt, Artificial Sequence
  Chemically synthesized
caguucaucagauucaucagaau

SEQ ID NO: 63017 - RNA, 23 nt, Artificial Sequence
  Chemically synthesized
caucuucaucauccauaucaucc

SEQ ID NO: 63018 - RNA, 23 nt, Artificial Sequence
  Chemically synthesized
aucuucaucauccauaucaucca

SEQ ID NO: 63019 - RNA, 23 nt, Artificial Sequence
  Chemically synthesized
ucuucaucauccauaucauccau

SEQ ID NO: 63020 - RNA, 23 nt, Artificial Sequence
  Chemically synthesized
cuucaucauccauaucauccaug

SEQ ID NO: 63021 - RNA, 23 nt, Artificial Sequence
  Chemically synthesized
uucaucauccauaucauccaugu

SEQ ID NO: 63022 - RNA, 23 nt, Artificial Sequence
  Chemically synthesized
ucccagaauuuaaaugcugcugc

SEQ ID NO: 63023 - RNA, 23 nt, Artificial Sequence
  Chemically synthesized
cccagaauuuaaaugcugcugca

SEQ ID NO: 63024 - RNA, 23 nt, Artificial Sequence
  Chemically synthesized
ccagaauuuaaaugcugcugcag

SEQ ID NO: 63025 - RNA, 23 nt, Artificial Sequence
  Chemically synthesized
cagaauuuaaaugcugcugcaga

SEQ ID NO: 63026 - RNA, 23 nt, Artificial Sequence
  Chemically synthesized
agaauuuaaaugcugcugcagac

SEQ ID NO: 63027 - RNA, 23 nt, Artificial Sequence
  Chemically synthesized
cagccuguuuaacugguauggca

SEQ ID NO: 63028 - RNA, 23 nt, Artificial Sequence
  Chemically synthesized
agccuguuuaacugguauggcac

SEQ ID NO: 63029 - RNA, 23 nt, Artificial Sequence
  Chemically synthesized
gccuguuuaacugguauggcaca

SEQ ID NO: 63030 - RNA, 23 nt, Artificial Sequence
  Chemically synthesized
ccuguuuaacugguauggcacag

SEQ ID NO: 63031 - RNA, 23 nt, Artificial Sequence
  Chemically synthesized
cuguuuaacugguauggcacagg

SEQ ID NO: 63032 - RNA, 23 nt, Artificial Sequence
  Chemically synthesized
aaugaacauagacauaacccuga

SEQ ID NO: 63033 - RNA, 23 nt, Artificial Sequence
  Chemically synthesized
augaacauagacauaacccugaa

SEQ ID NO: 63034 - RNA, 23 nt, Artificial Sequence
  Chemically synthesized
ugaacauagacauaacccugaag

SEQ ID NO: 63035 - RNA, 23 nt, Artificial Sequence
  Chemically synthesized
gaacauagacauaacccugaagc

SEQ ID NO: 63036 - RNA, 23 nt, Artificial Sequence
  Chemically synthesized
aacauagacauaacccugaagcu

SEQ ID NO: 63037 - RNA, 23 nt, Artificial Sequence
  Chemically synthesized
acauagacauaacccugaagcuu

SEQ ID NO: 63038 - RNA, 23 nt, Artificial Sequence
  Chemically synthesized
cauagacauaacccugaagcuuu

SEQ ID NO: 63039 - RNA, 23 nt, Artificial Sequence
  Chemically synthesized
auagacauaacccugaagcuuuu

SEQ ID NO: 63040 - RNA, 23 nt, Artificial Sequence
  Chemically synthesized
gcgaaacuucuuagauuuugacc

SEQ ID NO: 63041 - RNA, 23 nt, Artificial Sequence
  Chemically synthesized
cgaaacuucuuagauuuugaccu

SEQ ID NO: 63042 - RNA, 23 nt, Artificial Sequence
  Chemically synthesized
gaaacuucuuagauuuugaccuc

SEQ ID NO: 63043 - RNA, 23 nt, Artificial Sequence
  Chemically synthesized
aaacuucuuagauuuugaccuca

SEQ ID NO: 63044 - RNA, 23 nt, Artificial Sequence
  Chemically synthesized
aacuucuuagauuuugaccucag

SEQ ID NO: 63045 - RNA, 23 nt, Artificial Sequence
  Chemically synthesized
cagugaccaguucaucagauuca

SEQ ID NO: 63046 - RNA, 23 nt, Artificial Sequence
  Chemically synthesized
agugaccaguucaucagauucau

SEQ ID NO: 63047 - RNA, 23 nt, Artificial Sequence
  Chemically synthesized
gugaccaguucaucagauucauc

SEQ ID NO: 63048 - RNA, 23 nt, Artificial Sequence
  Chemically synthesized
aauaagcaauugacaccaccaaa

SEQ ID NO: 63049 - RNA, 23 nt, Artificial Sequence
  Chemically synthesized
guuauauucucuuuuuaaguggg

SEQ ID NO: 63050 - RNA, 23 nt, Artificial Sequence
  Chemically synthesized
uuauauucucuuuuuaagugggu

SEQ ID NO: 63051 - RNA, 23 nt, Artificial Sequence
  Chemically synthesized
uauauucucuuuuuaagugggua

SEQ ID NO: 63052 - RNA, 23 nt, Artificial Sequence
  Chemically synthesized
auauucucuuuuuaaguggguaa

SEQ ID NO: 63053 - RNA, 23 nt, Artificial Sequence
  Chemically synthesized
uauucucuuuuuaaguggguaaa

SEQ ID NO: 63054 - RNA, 23 nt, Artificial Sequence
  Chemically synthesized
acagugauaguuugcauuucuuc

SEQ ID NO: 63055 - RNA, 23 nt, Artificial Sequence
  Chemically synthesized
cagugauaguuugcauuucuucu

SEQ ID NO: 63056 - RNA, 23 nt, Artificial Sequence
  Chemically synthesized
agugauaguuugcauuucuucua

SEQ ID NO: 63057 - RNA, 23 nt, Artificial Sequence
  Chemically synthesized
gugauaguuugcauuucuucuau

SEQ ID NO: 63058 - RNA, 23 nt, Artificial Sequence
  Chemically synthesized
ugauaguuugcauuucuucuaua

SEQ ID NO: 63059 - RNA, 23 nt, Artificial Sequence
  Chemically synthesized
uagaaugaacauagacauaaccc

SEQ ID NO: 63060 - RNA, 23 nt, Artificial Sequence
  Chemically synthesized
agaaugaacauagacauaacccu

SEQ ID NO: 63061 - RNA, 23 nt, Artificial Sequence
  Chemically synthesized
gaaugaacauagacauaacccug

SEQ ID NO: 63062 - RNA, 23 nt, Artificial Sequence
  Chemically synthesized
uaguuauuuccagacucaaauag

SEQ ID NO: 63063 - RNA, 23 nt, Artificial Sequence
  Chemically synthesized
aguuauuuccagacucaaauaga

SEQ ID NO: 63064 - RNA, 23 nt, Artificial Sequence
  Chemically synthesized
guuauuuccagacucaaauagau

SEQ ID NO: 63065 - RNA, 23 nt, Artificial Sequence
  Chemically synthesized
uuauuuccagacucaaauagaua

SEQ ID NO: 63066 - RNA, 23 nt, Artificial Sequence
  Chemically synthesized
uauuuccagacucaaauagauac

SEQ ID NO: 63067 - RNA, 23 nt, Artificial Sequence
  Chemically synthesized
uguucucuuucauuuugcuauaa

SEQ ID NO: 63068 - RNA, 23 nt, Artificial Sequence
  Chemically synthesized
uuuuaauugaccucagaagaugc

SEQ ID NO: 63069 - RNA, 23 nt, Artificial Sequence
  Chemically synthesized
uuuaauugaccucagaagaugca

SEQ ID NO: 63070 - RNA, 23 nt, Artificial Sequence
  Chemically synthesized
uuaauugaccucagaagaugcac

SEQ ID NO: 63071 - RNA, 23 nt, Artificial Sequence
  Chemically synthesized
uaauugaccucagaagaugcacu

SEQ ID NO: 63072 - RNA, 23 nt, Artificial Sequence
  Chemically synthesized
aauugaccucagaagaugcacua

SEQ ID NO: 63073 - RNA, 23 nt, Artificial Sequence
  Chemically synthesized
auugaccucagaagaugcacuau

SEQ ID NO: 63074 - RNA, 23 nt, Artificial Sequence
  Chemically synthesized
uuccugacuaucaaucacaucgg

SEQ ID NO: 63075 - RNA, 23 nt, Artificial Sequence
  Chemically synthesized
uccugacuaucaaucacaucgga

SEQ ID NO: 63076 - RNA, 23 nt, Artificial Sequence
  Chemically synthesized
ccugacuaucaaucacaucggaa

SEQ ID NO: 63077 - RNA, 23 nt, Artificial Sequence
  Chemically synthesized
cugacuaucaaucacaucggaau

SEQ ID NO: 63078 - RNA, 23 nt, Artificial Sequence
  Chemically synthesized
ugacuaucaaucacaucggaaug

SEQ ID NO: 63079 - RNA, 23 nt, Artificial Sequence
  Chemically synthesized
auugcucucaucauuggcuuucc

SEQ ID NO: 63080 - RNA, 23 nt, Artificial Sequence
  Chemically synthesized
uugcucucaucauuggcuuuccg

SEQ ID NO: 63081 - RNA, 23 nt, Artificial Sequence
  Chemically synthesized
ugcucucaucauuggcuuuccgc

SEQ ID NO: 63082 - RNA, 23 nt, Artificial Sequence
  Chemically synthesized
gcucucaucauuggcuuuccgcu

SEQ ID NO: 63083 - RNA, 23 nt, Artificial Sequence
  Chemically synthesized
cucucaucauuggcuuuccgcuu

SEQ ID NO: 63084 - RNA, 23 nt, Artificial Sequence
  Chemically synthesized
ccuuguaugcaccauucaacucc

SEQ ID NO: 63085 - RNA, 23 nt, Artificial Sequence
  Chemically synthesized
cuuguaugcaccauucaacuccu

SEQ ID NO: 63086 - RNA, 23 nt, Artificial Sequence
  Chemically synthesized
uuguaugcaccauucaacuccuc

SEQ ID NO: 63087 - RNA, 23 nt, Artificial Sequence
  Chemically synthesized
uguaugcaccauucaacuccucg

SEQ ID NO: 63088 - RNA, 23 nt, Artificial Sequence
  Chemically synthesized
guaugcaccauucaacuccucgc

SEQ ID NO: 63089 - RNA, 23 nt, Artificial Sequence
  Chemically synthesized
acuucuuagauuuugaccucagu

SEQ ID NO: 63090 - RNA, 23 nt, Artificial Sequence
  Chemically synthesized
cuucuuagauuuugaccucaguc

SEQ ID NO: 63091 - RNA, 23 nt, Artificial Sequence
  Chemically synthesized
uucuuagauuuugaccucagucc

SEQ ID NO: 63092 - RNA, 23 nt, Artificial Sequence
  Chemically synthesized
ugguagugaguuuuccuuggucg

SEQ ID NO: 63093 - RNA, 23 nt, Artificial Sequence
  Chemically synthesized
gguagugaguuuuccuuggucgg

SEQ ID NO: 63094 - RNA, 23 nt, Artificial Sequence
  Chemically synthesized
guagugaguuuuccuuggucggc

SEQ ID NO: 63095 - RNA, 23 nt, Artificial Sequence
  Chemically synthesized
uagugaguuuuccuuggucggcg

SEQ ID NO: 63096 - RNA, 23 nt, Artificial Sequence
  Chemically synthesized
agugaguuuuccuuggucggcgu

SEQ ID NO: 63097 - RNA, 23 nt, Artificial Sequence
  Chemically synthesized
aguucaucagauucaucagaaug

SEQ ID NO: 63098 - RNA, 23 nt, Artificial Sequence
  Chemically synthesized
guucaucagauucaucagaaugg

SEQ ID NO: 63099 - RNA, 23 nt, Artificial Sequence
  Chemically synthesized
uucaucagauucaucagaauggu

SEQ ID NO: 63100 - RNA, 23 nt, Artificial Sequence
  Chemically synthesized
ucuacaucaucagagucguucga

SEQ ID NO: 63101 - RNA, 23 nt, Artificial Sequence
  Chemically synthesized
cuacaucaucagagucguucgag

SEQ ID NO: 63102 - RNA, 23 nt, Artificial Sequence
  Chemically synthesized
uacaucaucagagucguucgagu

SEQ ID NO: 63103 - RNA, 23 nt, Artificial Sequence
  Chemically synthesized
ccucagaacuuccagaaucagcc

SEQ ID NO: 63104 - RNA, 23 nt, Artificial Sequence
  Chemically synthesized
cucagaacuuccagaaucagccu

SEQ ID NO: 63105 - RNA, 23 nt, Artificial Sequence
  Chemically synthesized
ucagaacuuccagaaucagccug

SEQ ID NO: 63106 - RNA, 23 nt, Artificial Sequence
  Chemically synthesized
cagaacuuccagaaucagccugu

SEQ ID NO: 63107 - RNA, 23 nt, Artificial Sequence
  Chemically synthesized
agaacuuccagaaucagccuguu

SEQ ID NO: 63108 - RNA, 23 nt, Artificial Sequence
  Chemically synthesized
aaaacaaauaagcaauugacacc

SEQ ID NO: 63109 - RNA, 23 nt, Artificial Sequence
  Chemically synthesized
auaagcaauugacaccaccaaau

SEQ ID NO: 63110 - RNA, 23 nt, Artificial Sequence
  Chemically synthesized
auagaaugaacauagacauaacc

SEQ ID NO: 63111 - RNA, 23 nt, Artificial Sequence
  Chemically synthesized
auuuuuucuccuuuuaauugacc

SEQ ID NO: 63112 - RNA, 23 nt, Artificial Sequence
  Chemically synthesized
uuuuuucuccuuuuaauugaccu

SEQ ID NO: 63113 - RNA, 23 nt, Artificial Sequence
  Chemically synthesized
uuuuucuccuuuuaauugaccuc

SEQ ID NO: 63114 - RNA, 23 nt, Artificial Sequence
  Chemically synthesized
uuuucuccuuuuaauugaccuca

SEQ ID NO: 63115 - RNA, 23 nt, Artificial Sequence
  Chemically synthesized
uuucuccuuuuaauugaccucag

SEQ ID NO: 63116 - RNA, 23 nt, Artificial Sequence
  Chemically synthesized
guuuaucuucuuccuuacuuuug

SEQ ID NO: 63117 - RNA, 23 nt, Artificial Sequence
  Chemically synthesized
guuccugacuaucaaucacaucg

SEQ ID NO: 63118 - RNA, 23 nt, Artificial Sequence
  Chemically synthesized
aaucacaucggaaugcucauugc

SEQ ID NO: 63119 - RNA, 23 nt, Artificial Sequence
  Chemically synthesized
aucacaucggaaugcucauugcu

SEQ ID NO: 63120 - RNA, 23 nt, Artificial Sequence
  Chemically synthesized
ucacaucggaaugcucauugcuc

SEQ ID NO: 63121 - RNA, 23 nt, Artificial Sequence
  Chemically synthesized
cacaucggaaugcucauugcucu

SEQ ID NO: 63122 - RNA, 23 nt, Artificial Sequence
  Chemically synthesized
acaucggaaugcucauugcucuc

SEQ ID NO: 63123 - RNA, 23 nt, Artificial Sequence
  Chemically synthesized
uccgcuuauauaaucuggacugc

SEQ ID NO: 63124 - RNA, 23 nt, Artificial Sequence
  Chemically synthesized
ccgcuuauauaaucuggacugcu

SEQ ID NO: 63125 - RNA, 23 nt, Artificial Sequence
  Chemically synthesized
cgcuuauauaaucuggacugcuu

SEQ ID NO: 63126 - RNA, 23 nt, Artificial Sequence
  Chemically synthesized
gcuuauauaaucuggacugcuug

SEQ ID NO: 63127 - RNA, 23 nt, Artificial Sequence
  Chemically synthesized
cuuauauaaucuggacugcuugu

SEQ ID NO: 63128 - RNA, 23 nt, Artificial Sequence
  Chemically synthesized
gcugacucguuucauaacugucc

SEQ ID NO: 63129 - RNA, 23 nt, Artificial Sequence
  Chemically synthesized
cugacucguuucauaacuguccu

SEQ ID NO: 63130 - RNA, 23 nt, Artificial Sequence
  Chemically synthesized
ugacucguuucauaacuguccuu

SEQ ID NO: 63131 - RNA, 23 nt, Artificial Sequence
  Chemically synthesized
gacucguuucauaacuguccuuc

SEQ ID NO: 63132 - RNA, 23 nt, Artificial Sequence
  Chemically synthesized
acucguuucauaacuguccuucc

SEQ ID NO: 63133 - RNA, 23 nt, Artificial Sequence
  Chemically synthesized
cucguuucauaacuguccuuccc

SEQ ID NO: 63134 - RNA, 23 nt, Artificial Sequence
  Chemically synthesized
ucguuucauaacuguccuuccca

SEQ ID NO: 63135 - RNA, 23 nt, Artificial Sequence
  Chemically synthesized
cguuucauaacuguccuucccac

SEQ ID NO: 63136 - RNA, 23 nt, Artificial Sequence
  Chemically synthesized
guuucauaacuguccuucccacg

SEQ ID NO: 63137 - RNA, 23 nt, Artificial Sequence
  Chemically synthesized
uuucauaacuguccuucccacgg

SEQ ID NO: 63138 - RNA, 23 nt, Artificial Sequence
  Chemically synthesized
augguagugaguuuuccuugguc

SEQ ID NO: 63139 - RNA, 23 nt, Artificial Sequence
  Chemically synthesized
ugagaaucaucagugucaucuac

SEQ ID NO: 63140 - RNA, 23 nt, Artificial Sequence
  Chemically synthesized
gagaaucaucagugucaucuaca

SEQ ID NO: 63141 - RNA, 23 nt, Artificial Sequence
  Chemically synthesized
agaaucaucagugucaucuacau

SEQ ID NO: 63142 - RNA, 23 nt, Artificial Sequence
  Chemically synthesized
gaaucaucagugucaucuacauc

SEQ ID NO: 63143 - RNA, 23 nt, Artificial Sequence
  Chemically synthesized
ucagugucaucuacaucaucaga

SEQ ID NO: 63144 - RNA, 23 nt, Artificial Sequence
  Chemically synthesized
cagugucaucuacaucaucagag

SEQ ID NO: 63145 - RNA, 23 nt, Artificial Sequence
  Chemically synthesized
agugucaucuacaucaucagagu

SEQ ID NO: 63146 - RNA, 23 nt, Artificial Sequence
  Chemically synthesized
uucguuggacuuacuuggaaggg

SEQ ID NO: 63147 - RNA, 23 nt, Artificial Sequence
  Chemically synthesized
uuaggcaguaaaaaagguuaugu

SEQ ID NO: 63148 - RNA, 23 nt, Artificial Sequence
  Chemically synthesized
uaggcaguaaaaaagguuauguu

SEQ ID NO: 63149 - RNA, 23 nt, Artificial Sequence
  Chemically synthesized
aggcaguaaaaaagguuauguuu

SEQ ID NO: 63150 - RNA, 23 nt, Artificial Sequence
  Chemically synthesized
ggcaguaaaaaagguuauguuuu

SEQ ID NO: 63151 - RNA, 23 nt, Artificial Sequence
  Chemically synthesized
gcaguaaaaaagguuauguuuua

SEQ ID NO: 63152 - RNA, 23 nt, Artificial Sequence
  Chemically synthesized
uuuuauuaauugcuggacaaccg

SEQ ID NO: 63153 - RNA, 23 nt, Artificial Sequence
  Chemically synthesized
uuuauuaauugcuggacaaccgu

SEQ ID NO: 63154 - RNA, 23 nt, Artificial Sequence
  Chemically synthesized
uuauuaauugcuggacaaccgug

SEQ ID NO: 63155 - RNA, 23 nt, Artificial Sequence
  Chemically synthesized
uauuaauugcuggacaaccgugg

SEQ ID NO: 63156 - RNA, 23 nt, Artificial Sequence
  Chemically synthesized
gauaguuugcauuucuucuauag

SEQ ID NO: 63157 - RNA, 23 nt, Artificial Sequence
  Chemically synthesized
auaguuugcauuucuucuauaga

SEQ ID NO: 63158 - RNA, 23 nt, Artificial Sequence
  Chemically synthesized
uaguuugcauuucuucuauagaa

SEQ ID NO: 63159 - RNA, 23 nt, Artificial Sequence
  Chemically synthesized
aguuugcauuucuucuauagaau

SEQ ID NO: 63160 - RNA, 23 nt, Artificial Sequence
  Chemically synthesized
guuugcauuucuucuauagaaug

SEQ ID NO: 63161 - RNA, 23 nt, Artificial Sequence
  Chemically synthesized
uuuccagacucaaauagauacac

SEQ ID NO: 63162 - RNA, 23 nt, Artificial Sequence
  Chemically synthesized
uuccagacucaaauagauacaca

SEQ ID NO: 63163 - RNA, 23 nt, Artificial Sequence
  Chemically synthesized
uccagacucaaauagauacacau

SEQ ID NO: 63164 - RNA, 23 nt, Artificial Sequence
  Chemically synthesized
ccagacucaaauagauacacauu

SEQ ID NO: 63165 - RNA, 23 nt, Artificial Sequence
  Chemically synthesized
cagacucaaauagauacacauuc

SEQ ID NO: 63166 - RNA, 23 nt, Artificial Sequence
  Chemically synthesized
auagauacacauucaaccaauaa

SEQ ID NO: 63167 - RNA, 23 nt, Artificial Sequence
  Chemically synthesized
uagauacacauucaaccaauaaa

SEQ ID NO: 63168 - RNA, 23 nt, Artificial Sequence
  Chemically synthesized
acacauucaaccaauaaacugag

SEQ ID NO: 63169 - RNA, 23 nt, Artificial Sequence
  Chemically synthesized
cacauucaaccaauaaacugaga

SEQ ID NO: 63170 - RNA, 23 nt, Artificial Sequence
  Chemically synthesized
acauucaaccaauaaacugagaa

SEQ ID NO: 63171 - RNA, 23 nt, Artificial Sequence
  Chemically synthesized
cauucaaccaauaaacugagaaa

SEQ ID NO: 63172 - RNA, 23 nt, Artificial Sequence
  Chemically synthesized
auucaaccaauaaacugagaaag

SEQ ID NO: 63173 - RNA, 23 nt, Artificial Sequence
  Chemically synthesized
cuuuuaauugaccucagaagaug

SEQ ID NO: 63174 - RNA, 23 nt, Artificial Sequence
  Chemically synthesized
auacgaaauuucagguguuuauc

SEQ ID NO: 63175 - RNA, 23 nt, Artificial Sequence
  Chemically synthesized
uacgaaauuucagguguuuaucu

SEQ ID NO: 63176 - RNA, 23 nt, Artificial Sequence
  Chemically synthesized
agguguuuaucuucuuccuuacu

SEQ ID NO: 63177 - RNA, 23 nt, Artificial Sequence
  Chemically synthesized
gguguuuaucuucuuccuuacuu

SEQ ID NO: 63178 - RNA, 23 nt, Artificial Sequence
  Chemically synthesized
guguuuaucuucuuccuuacuuu

SEQ ID NO: 63179 - RNA, 23 nt, Artificial Sequence
  Chemically synthesized
uguuuaucuucuuccuuacuuuu

SEQ ID NO: 63180 - RNA, 23 nt, Artificial Sequence
  Chemically synthesized
cauugcucucaucauuggcuuuc

SEQ ID NO: 63181 - RNA, 23 nt, Artificial Sequence
  Chemically synthesized
ucucaucauuggcuuuccgcuua

SEQ ID NO: 63182 - RNA, 23 nt, Artificial Sequence
  Chemically synthesized
cggccaucauaugugucuacugu

SEQ ID NO: 63183 - RNA, 23 nt, Artificial Sequence
  Chemically synthesized
ggccaucauaugugucuacugug

SEQ ID NO: 63184 - RNA, 23 nt, Artificial Sequence
  Chemically synthesized
gccaucauaugugucuacugugg

SEQ ID NO: 63185 - RNA, 23 nt, Artificial Sequence
  Chemically synthesized
ccaucauaugugucuacuguggg

SEQ ID NO: 63186 - RNA, 23 nt, Artificial Sequence
  Chemically synthesized
caucauaugugucuacugugggg

SEQ ID NO: 63187 - RNA, 23 nt, Artificial Sequence
  Chemically synthesized
gaguuuuccuuggucggcguuug

SEQ ID NO: 63188 - RNA, 23 nt, Artificial Sequence
  Chemically synthesized
aguuuuccuuggucggcguuugg

SEQ ID NO: 63189 - RNA, 23 nt, Artificial Sequence
  Chemically synthesized
guuuuccuuggucggcguuuggc

SEQ ID NO: 63190 - RNA, 23 nt, Artificial Sequence
  Chemically synthesized
uuuuccuuggucggcguuuggcu

SEQ ID NO: 63191 - RNA, 23 nt, Artificial Sequence
  Chemically synthesized
uuuccuuggucggcguuuggcug

SEQ ID NO: 63192 - RNA, 23 nt, Artificial Sequence
  Chemically synthesized
gugucaucuacaucaucagaguc

SEQ ID NO: 63193 - RNA, 23 nt, Artificial Sequence
  Chemically synthesized
ucaucauccauaucauccaugug

SEQ ID NO: 63194 - RNA, 23 nt, Artificial Sequence
  Chemically synthesized
ucguuggacuuacuuggaagggu

SEQ ID NO: 63195 - RNA, 23 nt, Artificial Sequence
  Chemically synthesized
cguuggacuuacuuggaaggguc

SEQ ID NO: 63196 - RNA, 23 nt, Artificial Sequence
  Chemically synthesized
guuggacuuacuuggaagggucu

SEQ ID NO: 63197 - RNA, 23 nt, Artificial Sequence
  Chemically synthesized
uuggacuuacuuggaagggucuc

SEQ ID NO: 63198 - RNA, 23 nt, Artificial Sequence
  Chemically synthesized
aagcaauugacaccaccaaauuc

SEQ ID NO: 63199 - RNA, 23 nt, Artificial Sequence
  Chemically synthesized
ugacaccaccaaauucuuauuac

SEQ ID NO: 63200 - RNA, 23 nt, Artificial Sequence
  Chemically synthesized
gacaccaccaaauucuuauuaca

SEQ ID NO: 63201 - RNA, 23 nt, Artificial Sequence
  Chemically synthesized
acaccaccaaauucuuauuacau

SEQ ID NO: 63202 - RNA, 23 nt, Artificial Sequence
  Chemically synthesized
caccaccaaauucuuauuacauu

SEQ ID NO: 63203 - RNA, 23 nt, Artificial Sequence
  Chemically synthesized
accaccaaauucuuauuacauuc

SEQ ID NO: 63204 - RNA, 23 nt, Artificial Sequence
  Chemically synthesized
gauaaaagauuuauucacaccac

SEQ ID NO: 63205 - RNA, 23 nt, Artificial Sequence
  Chemically synthesized
auaaaagauuuauucacaccaca

SEQ ID NO: 63206 - RNA, 23 nt, Artificial Sequence
  Chemically synthesized
uaaaagauuuauucacaccacaa

SEQ ID NO: 63207 - RNA, 23 nt, Artificial Sequence
  Chemically synthesized
aaaagauuuauucacaccacaaa

SEQ ID NO: 63208 - RNA, 23 nt, Artificial Sequence
  Chemically synthesized
aaagauuuauucacaccacaaaa

SEQ ID NO: 63209 - RNA, 23 nt, Artificial Sequence
  Chemically synthesized
auucucuuuuuaaguggguaaaa

SEQ ID NO: 63210 - RNA, 23 nt, Artificial Sequence
  Chemically synthesized
agacucaaauagauacacauuca

SEQ ID NO: 63211 - RNA, 23 nt, Artificial Sequence
  Chemically synthesized
uacacauucaaccaauaaacuga

SEQ ID NO: 63212 - RNA, 23 nt, Artificial Sequence
  Chemically synthesized
aaccaauaaacugagaaagaagc

SEQ ID NO: 63213 - RNA, 23 nt, Artificial Sequence
  Chemically synthesized
accaauaaacugagaaagaagca

SEQ ID NO: 63214 - RNA, 23 nt, Artificial Sequence
  Chemically synthesized
ccaauaaacugagaaagaagcau

SEQ ID NO: 63215 - RNA, 23 nt, Artificial Sequence
  Chemically synthesized
caauaaacugagaaagaagcauu

SEQ ID NO: 63216 - RNA, 23 nt, Artificial Sequence
  Chemically synthesized
aauaaacugagaaagaagcauuu

SEQ ID NO: 63217 - RNA, 23 nt, Artificial Sequence
  Chemically synthesized
ucuuuugacuaaaugcaaaguga

SEQ ID NO: 63218 - RNA, 23 nt, Artificial Sequence
  Chemically synthesized
cuuuugacuaaaugcaaagugag

SEQ ID NO: 63219 - RNA, 23 nt, Artificial Sequence
  Chemically synthesized
uuuugacuaaaugcaaagugaga

SEQ ID NO: 63220 - RNA, 23 nt, Artificial Sequence
  Chemically synthesized
uuugacuaaaugcaaagugagaa

SEQ ID NO: 63221 - RNA, 23 nt, Artificial Sequence
  Chemically synthesized
uugacuaaaugcaaagugagaaa

SEQ ID NO: 63222 - RNA, 23 nt, Artificial Sequence
  Chemically synthesized
uucuccuuuuaauugaccucaga

SEQ ID NO: 63223 - RNA, 23 nt, Artificial Sequence
  Chemically synthesized
aaaguuccugacuaucaaucaca

SEQ ID NO: 63224 - RNA, 23 nt, Artificial Sequence
  Chemically synthesized
aaguuccugacuaucaaucacau

SEQ ID NO: 63225 - RNA, 23 nt, Artificial Sequence
  Chemically synthesized
aguuccugacuaucaaucacauc

SEQ ID NO: 63226 - RNA, 23 nt, Artificial Sequence
  Chemically synthesized
uggcuuuccgcuuauauaaucug

SEQ ID NO: 63227 - RNA, 23 nt, Artificial Sequence
  Chemically synthesized
uuuccaugugugaggugaugucc

SEQ ID NO: 63228 - RNA, 23 nt, Artificial Sequence
  Chemically synthesized
uuccaugugugaggugauguccu

SEQ ID NO: 63229 - RNA, 23 nt, Artificial Sequence
  Chemically synthesized
uccaugugugaggugauguccuc

SEQ ID NO: 63230 - RNA, 23 nt, Artificial Sequence
  Chemically synthesized
ccaugugugaggugauguccucg

SEQ ID NO: 63231 - RNA, 23 nt, Artificial Sequence
  Chemically synthesized
caugugugaggugauguccucgu

SEQ ID NO: 63232 - RNA, 23 nt, Artificial Sequence
  Chemically synthesized
cauaaaccacacuaucaccucgg

SEQ ID NO: 63233 - RNA, 23 nt, Artificial Sequence
  Chemically synthesized
auaaaccacacuaucaccucggc

SEQ ID NO: 63234 - RNA, 23 nt, Artificial Sequence
  Chemically synthesized
uaaaccacacuaucaccucggcc

SEQ ID NO: 63235 - RNA, 23 nt, Artificial Sequence
  Chemically synthesized
aaaccacacuaucaccucggcca

SEQ ID NO: 63236 - RNA, 23 nt, Artificial Sequence
  Chemically synthesized
aaccacacuaucaccucggccau

SEQ ID NO: 63237 - RNA, 23 nt, Artificial Sequence
  Chemically synthesized
aucauaugugucuacugugggga

SEQ ID NO: 63238 - RNA, 23 nt, Artificial Sequence
  Chemically synthesized
ucaugguagugaguuuuccuugg

SEQ ID NO: 63239 - RNA, 23 nt, Artificial Sequence
  Chemically synthesized
caugguagugaguuuuccuuggu

SEQ ID NO: 63240 - RNA, 23 nt, Artificial Sequence
  Chemically synthesized
caucauccauaucauccaugugg

SEQ ID NO: 63241 - RNA, 23 nt, Artificial Sequence
  Chemically synthesized
aucauccauaucauccauguggu

SEQ ID NO: 63242 - RNA, 23 nt, Artificial Sequence
  Chemically synthesized
ucauccauaucauccaugugguc

SEQ ID NO: 63243 - RNA, 23 nt, Artificial Sequence
  Chemically synthesized
gucauggcuuucguuggacuuac

SEQ ID NO: 63244 - RNA, 23 nt, Artificial Sequence
  Chemically synthesized
ucauggcuuucguuggacuuacu

SEQ ID NO: 63245 - RNA, 23 nt, Artificial Sequence
  Chemically synthesized
cauggcuuucguuggacuuacuu

SEQ ID NO: 63246 - RNA, 23 nt, Artificial Sequence
  Chemically synthesized
auggcuuucguuggacuuacuug

SEQ ID NO: 63247 - RNA, 23 nt, Artificial Sequence
  Chemically synthesized
aagcccucccagaauuuaaaugc

SEQ ID NO: 63248 - RNA, 23 nt, Artificial Sequence
  Chemically synthesized
agcccucccagaauuuaaaugcu

SEQ ID NO: 63249 - RNA, 23 nt, Artificial Sequence
  Chemically synthesized
gcccucccagaauuuaaaugcug

SEQ ID NO: 63250 - RNA, 23 nt, Artificial Sequence
  Chemically synthesized
cccucccagaauuuaaaugcugc

SEQ ID NO: 63251 - RNA, 23 nt, Artificial Sequence
  Chemically synthesized
ccucccagaauuuaaaugcugcu

SEQ ID NO: 63252 - RNA, 23 nt, Artificial Sequence
  Chemically synthesized
uagacauaacccugaagcuuuua

SEQ ID NO: 63253 - RNA, 23 nt, Artificial Sequence
  Chemically synthesized
ucaaacacauuaguuauuuccag

SEQ ID NO: 63254 - RNA, 23 nt, Artificial Sequence
  Chemically synthesized
caaacacauuaguuauuuccaga

SEQ ID NO: 63255 - RNA, 23 nt, Artificial Sequence
  Chemically synthesized
aaacacauuaguuauuuccagac

SEQ ID NO: 63256 - RNA, 23 nt, Artificial Sequence
  Chemically synthesized
aacacauuaguuauuuccagacu

SEQ ID NO: 63257 - RNA, 23 nt, Artificial Sequence
  Chemically synthesized
acacauuaguuauuuccagacuc

SEQ ID NO: 63258 - RNA, 23 nt, Artificial Sequence
  Chemically synthesized
cacauuaguuauuuccagacuca

SEQ ID NO: 63259 - RNA, 23 nt, Artificial Sequence
  Chemically synthesized
acauuaguuauuuccagacucaa

SEQ ID NO: 63260 - RNA, 23 nt, Artificial Sequence
  Chemically synthesized
cauuaguuauuuccagacucaaa

SEQ ID NO: 63261 - RNA, 23 nt, Artificial Sequence
  Chemically synthesized
auuaguuauuuccagacucaaau

SEQ ID NO: 63262 - RNA, 23 nt, Artificial Sequence
  Chemically synthesized
uuaguuauuuccagacucaaaua

SEQ ID NO: 63263 - RNA, 23 nt, Artificial Sequence
  Chemically synthesized
auuuccagacucaaauagauaca

SEQ ID NO: 63264 - RNA, 23 nt, Artificial Sequence
  Chemically synthesized
gaagcauuucauguucucuuuca

SEQ ID NO: 63265 - RNA, 23 nt, Artificial Sequence
  Chemically synthesized
aagcauuucauguucucuuucau

SEQ ID NO: 63266 - RNA, 23 nt, Artificial Sequence
  Chemically synthesized
agcauuucauguucucuuucauu

SEQ ID NO: 63267 - RNA, 23 nt, Artificial Sequence
  Chemically synthesized
gcauuucauguucucuuucauuu

SEQ ID NO: 63268 - RNA, 23 nt, Artificial Sequence
  Chemically synthesized
cauuucauguucucuuucauuuu

SEQ ID NO: 63269 - RNA, 23 nt, Artificial Sequence
  Chemically synthesized
uugaccucagaagaugcacuauc

SEQ ID NO: 63270 - RNA, 23 nt, Artificial Sequence
  Chemically synthesized
uggaaaguuccugacuaucaauc

SEQ ID NO: 63271 - RNA, 23 nt, Artificial Sequence
  Chemically synthesized
ggaaaguuccugacuaucaauca

SEQ ID NO: 63272 - RNA, 23 nt, Artificial Sequence
  Chemically synthesized
gaaaguuccugacuaucaaucac

SEQ ID NO: 63273 - RNA, 23 nt, Artificial Sequence
  Chemically synthesized
caaucacaucggaaugcucauug

SEQ ID NO: 63274 - RNA, 23 nt, Artificial Sequence
  Chemically synthesized
cucaucauuggcuuuccgcuuau

SEQ ID NO: 63275 - RNA, 23 nt, Artificial Sequence
  Chemically synthesized
uuauauaaucuggacugcuugug

SEQ ID NO: 63276 - RNA, 23 nt, Artificial Sequence
  Chemically synthesized
uauauaaucuggacugcuugugg

SEQ ID NO: 63277 - RNA, 23 nt, Artificial Sequence
  Chemically synthesized
auauaaucuggacugcuuguggc

SEQ ID NO: 63278 - RNA, 23 nt, Artificial Sequence
  Chemically synthesized
uauaaucuggacugcuuguggcu

SEQ ID NO: 63279 - RNA, 23 nt, Artificial Sequence
  Chemically synthesized
auaaucuggacugcuuguggcug

SEQ ID NO: 63280 - RNA, 23 nt, Artificial Sequence
  Chemically synthesized
uaaucuggacugcuuguggcugu

SEQ ID NO: 63281 - RNA, 23 nt, Artificial Sequence
  Chemically synthesized
aaucuggacugcuuguggcugug

SEQ ID NO: 63282 - RNA, 23 nt, Artificial Sequence
  Chemically synthesized
ggucauccagcugacucguuuca

SEQ ID NO: 63283 - RNA, 23 nt, Artificial Sequence
  Chemically synthesized
gucauccagcugacucguuucau

SEQ ID NO: 63284 - RNA, 23 nt, Artificial Sequence
  Chemically synthesized
ucauccagcugacucguuucaua

SEQ ID NO: 63285 - RNA, 23 nt, Artificial Sequence
  Chemically synthesized
cauccagcugacucguuucauaa

SEQ ID NO: 63286 - RNA, 23 nt, Artificial Sequence
  Chemically synthesized
auccagcugacucguuucauaac

SEQ ID NO: 63287 - RNA, 23 nt, Artificial Sequence
  Chemically synthesized
cagcugacucguuucauaacugu

SEQ ID NO: 63288 - RNA, 23 nt, Artificial Sequence
  Chemically synthesized
agcugacucguuucauaacuguc

SEQ ID NO: 63289 - RNA, 23 nt, Artificial Sequence
  Chemically synthesized
uaugcaccauucaacuccucgcu

SEQ ID NO: 63290 - RNA, 23 nt, Artificial Sequence
  Chemically synthesized
ccauaaaccacacuaucaccucg

SEQ ID NO: 63291 - RNA, 23 nt, Artificial Sequence
  Chemically synthesized
ucucaugguagugaguuuuccuu

SEQ ID NO: 63292 - RNA, 23 nt, Artificial Sequence
  Chemically synthesized
cucaugguagugaguuuuccuug

SEQ ID NO: 63293 - RNA, 23 nt, Artificial Sequence
  Chemically synthesized
uaucaccucggccaucauaugug

SEQ ID NO: 63294 - RNA, 23 nt, Artificial Sequence
  Chemically synthesized
aucaccucggccaucauaugugu

SEQ ID NO: 63295 - RNA, 23 nt, Artificial Sequence
  Chemically synthesized
ucaccucggccaucauauguguc

SEQ ID NO: 63296 - RNA, 23 nt, Artificial Sequence
  Chemically synthesized
caccucggccaucauaugugucu

SEQ ID NO: 63297 - RNA, 23 nt, Artificial Sequence
  Chemically synthesized
accucggccaucauaugugucua

SEQ ID NO: 63298 - RNA, 23 nt, Artificial Sequence
  Chemically synthesized
ugggaaaaucagugaccaguuca

SEQ ID NO: 63299 - RNA, 23 nt, Artificial Sequence
  Chemically synthesized
gggaaaaucagugaccaguucau

SEQ ID NO: 63300 - RNA, 23 nt, Artificial Sequence
  Chemically synthesized
ggaaaaucagugaccaguucauc

SEQ ID NO: 63301 - RNA, 23 nt, Artificial Sequence
  Chemically synthesized
gaaaaucagugaccaguucauca

SEQ ID NO: 63302 - RNA, 23 nt, Artificial Sequence
  Chemically synthesized
aaaaucagugaccaguucaucag

SEQ ID NO: 63303 - RNA, 23 nt, Artificial Sequence
  Chemically synthesized
ggugagaaucaucagugucaucu

SEQ ID NO: 63304 - RNA, 23 nt, Artificial Sequence
  Chemically synthesized
gugagaaucaucagugucaucua

SEQ ID NO: 63305 - RNA, 23 nt, Artificial Sequence
  Chemically synthesized
acaucaucagagucguucgaguc

SEQ ID NO: 63306 - RNA, 23 nt, Artificial Sequence
  Chemically synthesized
caucaucagagucguucgaguca

SEQ ID NO: 63307 - RNA, 23 nt, Artificial Sequence
  Chemically synthesized
aucaucagagucguucgagucaa

SEQ ID NO: 63308 - RNA, 23 nt, Artificial Sequence
  Chemically synthesized
cucccagaauuuaaaugcugcug

SEQ ID NO: 63309 - RNA, 23 nt, Artificial Sequence
  Chemically synthesized
cugcuuuuccucagaacuuccag

SEQ ID NO: 63310 - RNA, 23 nt, Artificial Sequence
  Chemically synthesized
ugcuuuuccucagaacuuccaga

SEQ ID NO: 63311 - RNA, 23 nt, Artificial Sequence
  Chemically synthesized
gcuuuuccucagaacuuccagaa

SEQ ID NO: 63312 - RNA, 23 nt, Artificial Sequence
  Chemically synthesized
cuuuuccucagaacuuccagaau

SEQ ID NO: 63313 - RNA, 23 nt, Artificial Sequence
  Chemically synthesized
uuuuccucagaacuuccagaauc

SEQ ID NO: 63314 - RNA, 23 nt, Artificial Sequence
  Chemically synthesized
uccagaaucagccuguuuaacug

SEQ ID NO: 63315 - RNA, 23 nt, Artificial Sequence
  Chemically synthesized
ccagaaucagccuguuuaacugg

SEQ ID NO: 63316 - RNA, 23 nt, Artificial Sequence
  Chemically synthesized
cagaaucagccuguuuaacuggu

SEQ ID NO: 63317 - RNA, 23 nt, Artificial Sequence
  Chemically synthesized
agaaucagccuguuuaacuggua

SEQ ID NO: 63318 - RNA, 23 nt, Artificial Sequence
  Chemically synthesized
gaaucagccuguuuaacugguau

SEQ ID NO: 63319 - RNA, 23 nt, Artificial Sequence
  Chemically synthesized
ucacaccacaaaaagauaaucac

SEQ ID NO: 63320 - RNA, 23 nt, Artificial Sequence
  Chemically synthesized
cacaccacaaaaagauaaucaca

SEQ ID NO: 63321 - RNA, 23 nt, Artificial Sequence
  Chemically synthesized
acaccacaaaaagauaaucacaa

SEQ ID NO: 63322 - RNA, 23 nt, Artificial Sequence
  Chemically synthesized
caccacaaaaagauaaucacaac

SEQ ID NO: 63323 - RNA, 23 nt, Artificial Sequence
  Chemically synthesized
acuaaaugcaaagugagaaauug

SEQ ID NO: 63324 - RNA, 23 nt, Artificial Sequence
  Chemically synthesized
cuaaaugcaaagugagaaauugu

SEQ ID NO: 63325 - RNA, 23 nt, Artificial Sequence
  Chemically synthesized
uaaaugcaaagugagaaauugua

SEQ ID NO: 63326 - RNA, 23 nt, Artificial Sequence
  Chemically synthesized
aaaugcaaagugagaaauuguau

SEQ ID NO: 63327 - RNA, 23 nt, Artificial Sequence
  Chemically synthesized
aaugcaaagugagaaauuguauu

SEQ ID NO: 63328 - RNA, 23 nt, Artificial Sequence
  Chemically synthesized
ucuccuuuuaauugaccucagaa

SEQ ID NO: 63329 - RNA, 23 nt, Artificial Sequence
  Chemically synthesized
cuccuuuuaauugaccucagaag

SEQ ID NO: 63330 - RNA, 23 nt, Artificial Sequence
  Chemically synthesized
uccuuuuaauugaccucagaaga

SEQ ID NO: 63331 - RNA, 23 nt, Artificial Sequence
  Chemically synthesized
ccuuuuaauugaccucagaagau

SEQ ID NO: 63332 - RNA, 23 nt, Artificial Sequence
  Chemically synthesized
aagaugcacuaucuaauucauga

SEQ ID NO: 63333 - RNA, 23 nt, Artificial Sequence
  Chemically synthesized
agaugcacuaucuaauucaugag

SEQ ID NO: 63334 - RNA, 23 nt, Artificial Sequence
  Chemically synthesized
gaugcacuaucuaauucaugaga

SEQ ID NO: 63335 - RNA, 23 nt, Artificial Sequence
  Chemically synthesized
augcacuaucuaauucaugagaa

SEQ ID NO: 63336 - RNA, 23 nt, Artificial Sequence
  Chemically synthesized
ugcacuaucuaauucaugagaaa

SEQ ID NO: 63337 - RNA, 23 nt, Artificial Sequence
  Chemically synthesized
ggucuacaaccagcauaucuuca

SEQ ID NO: 63338 - RNA, 23 nt, Artificial Sequence
  Chemically synthesized
gucuacaaccagcauaucuucau

SEQ ID NO: 63339 - RNA, 23 nt, Artificial Sequence
  Chemically synthesized
ucuacaaccagcauaucuucaug

SEQ ID NO: 63340 - RNA, 23 nt, Artificial Sequence
  Chemically synthesized
cuacaaccagcauaucuucaugg

SEQ ID NO: 63341 - RNA, 23 nt, Artificial Sequence
  Chemically synthesized
uacaaccagcauaucuucauggc

SEQ ID NO: 63342 - RNA, 23 nt, Artificial Sequence
  Chemically synthesized
guggaauucacggcugacuuugg

SEQ ID NO: 63343 - RNA, 23 nt, Artificial Sequence
  Chemically synthesized
uggaauucacggcugacuuugga

SEQ ID NO: 63344 - RNA, 23 nt, Artificial Sequence
  Chemically synthesized
ggaauucacggcugacuuuggaa

SEQ ID NO: 63345 - RNA, 23 nt, Artificial Sequence
  Chemically synthesized
gaauucacggcugacuuuggaaa

SEQ ID NO: 63346 - RNA, 23 nt, Artificial Sequence
  Chemically synthesized
aauucacggcugacuuuggaaag

SEQ ID NO: 63347 - RNA, 23 nt, Artificial Sequence
  Chemically synthesized
ucaaucacaucggaaugcucauu

SEQ ID NO: 63348 - RNA, 23 nt, Artificial Sequence
  Chemically synthesized
uuggcuuuccgcuuauauaaucu

SEQ ID NO: 63349 - RNA, 23 nt, Artificial Sequence
  Chemically synthesized
agcaaaucacugcaauucucaug

SEQ ID NO: 63350 - RNA, 23 nt, Artificial Sequence
  Chemically synthesized
augcaccauucaacuccucgcuu

SEQ ID NO: 63351 - RNA, 23 nt, Artificial Sequence
  Chemically synthesized
caccauucaacuccucgcuuucc

SEQ ID NO: 63352 - RNA, 23 nt, Artificial Sequence
  Chemically synthesized
accauucaacuccucgcuuucca

SEQ ID NO: 63353 - RNA, 23 nt, Artificial Sequence
  Chemically synthesized
ccauucaacuccucgcuuuccau

SEQ ID NO: 63354 - RNA, 23 nt, Artificial Sequence
  Chemically synthesized
cauucaacuccucgcuuuccaug

SEQ ID NO: 63355 - RNA, 23 nt, Artificial Sequence
  Chemically synthesized
auucaacuccucgcuuuccaugu

SEQ ID NO: 63356 - RNA, 23 nt, Artificial Sequence
  Chemically synthesized
uucaacuccucgcuuuccaugug

SEQ ID NO: 63357 - RNA, 23 nt, Artificial Sequence
  Chemically synthesized
ucaacuccucgcuuuccaugugu

SEQ ID NO: 63358 - RNA, 23 nt, Artificial Sequence
  Chemically synthesized
caacuccucgcuuuccaugugug

SEQ ID NO: 63359 - RNA, 23 nt, Artificial Sequence
  Chemically synthesized
aacuccucgcuuuccauguguga

SEQ ID NO: 63360 - RNA, 23 nt, Artificial Sequence
  Chemically synthesized
ggugauguccucgucuguagcau

SEQ ID NO: 63361 - RNA, 23 nt, Artificial Sequence
  Chemically synthesized
gugauguccucgucuguagcauc

SEQ ID NO: 63362 - RNA, 23 nt, Artificial Sequence
  Chemically synthesized
ugauguccucgucuguagcauca

SEQ ID NO: 63363 - RNA, 23 nt, Artificial Sequence
  Chemically synthesized
gauguccucgucuguagcaucag

SEQ ID NO: 63364 - RNA, 23 nt, Artificial Sequence
  Chemically synthesized
auguccucgucuguagcaucagg

SEQ ID NO: 63365 - RNA, 23 nt, Artificial Sequence
  Chemically synthesized
uguccucgucuguagcaucaggg

SEQ ID NO: 63366 - RNA, 23 nt, Artificial Sequence
  Chemically synthesized
guccucgucuguagcaucagggu

SEQ ID NO: 63367 - RNA, 23 nt, Artificial Sequence
  Chemically synthesized
gcugcuuuuccucagaacuucca

SEQ ID NO: 63368 - RNA, 23 nt, Artificial Sequence
  Chemically synthesized
uaagcaauugacaccaccaaauu

SEQ ID NO: 63369 - RNA, 23 nt, Artificial Sequence
  Chemically synthesized
accacaaaaagauaaucacaaca

SEQ ID NO: 63370 - RNA, 23 nt, Artificial Sequence
  Chemically synthesized
auaaacugagaaagaagcauuuc

SEQ ID NO: 63371 - RNA, 23 nt, Artificial Sequence
  Chemically synthesized
ucuuagauuuugaccucagucca

SEQ ID NO: 63372 - RNA, 23 nt, Artificial Sequence
  Chemically synthesized
guccauaaaccacacuaucaccu

SEQ ID NO: 63373 - RNA, 23 nt, Artificial Sequence
  Chemically synthesized
uccauaaaccacacuaucaccuc

SEQ ID NO: 63374 - RNA, 23 nt, Artificial Sequence
  Chemically synthesized
ucaucagauucaucagaauggug

SEQ ID NO: 63375 - RNA, 23 nt, Artificial Sequence
  Chemically synthesized
caucagauucaucagaaugguga

SEQ ID NO: 63376 - RNA, 23 nt, Artificial Sequence
  Chemically synthesized
aucagauucaucagaauggugag

SEQ ID NO: 63377 - RNA, 23 nt, Artificial Sequence
  Chemically synthesized
gugaguuuuccuuggucggcguu

SEQ ID NO: 63378 - RNA, 23 nt, Artificial Sequence
  Chemically synthesized
ugaguuuuccuuggucggcguuu

SEQ ID NO: 63379 - RNA, 23 nt, Artificial Sequence
  Chemically synthesized
auucaucagaauggugagacuca

SEQ ID NO: 63380 - RNA, 23 nt, Artificial Sequence
  Chemically synthesized
uucaucagaauggugagacucau

SEQ ID NO: 63381 - RNA, 23 nt, Artificial Sequence
  Chemically synthesized
ucaucagaauggugagacucauc

SEQ ID NO: 63382 - RNA, 23 nt, Artificial Sequence
  Chemically synthesized
caucagaauggugagacucauca

SEQ ID NO: 63383 - RNA, 23 nt, Artificial Sequence
  Chemically synthesized
aucagaauggugagacucaucag

SEQ ID NO: 63384 - RNA, 23 nt, Artificial Sequence
  Chemically synthesized
aucaucuucaucauccauaucau

SEQ ID NO: 63385 - RNA, 23 nt, Artificial Sequence
  Chemically synthesized
ucaucuucaucauccauaucauc

SEQ ID NO: 63386 - RNA, 23 nt, Artificial Sequence
  Chemically synthesized
uuuccucagaacuuccagaauca

SEQ ID NO: 63387 - RNA, 23 nt, Artificial Sequence
  Chemically synthesized
uuuaaguggguaaaaguauuuug

SEQ ID NO: 63388 - RNA, 23 nt, Artificial Sequence
  Chemically synthesized
uuaaguggguaaaaguauuuugu

SEQ ID NO: 63389 - RNA, 23 nt, Artificial Sequence
  Chemically synthesized
uaaguggguaaaaguauuuuguu

SEQ ID NO: 63390 - RNA, 23 nt, Artificial Sequence
  Chemically synthesized
aaguggguaaaaguauuuuguuu

SEQ ID NO: 63391 - RNA, 23 nt, Artificial Sequence
  Chemically synthesized
aguggguaaaaguauuuuguuug

SEQ ID NO: 63392 - RNA, 23 nt, Artificial Sequence
  Chemically synthesized
agauacacauucaaccaauaaac

SEQ ID NO: 63393 - RNA, 23 nt, Artificial Sequence
  Chemically synthesized
gauacacauucaaccaauaaacu

SEQ ID NO: 63394 - RNA, 23 nt, Artificial Sequence
  Chemically synthesized
auacacauucaaccaauaaacug

SEQ ID NO: 63395 - RNA, 23 nt, Artificial Sequence
  Chemically synthesized
uucaaccaauaaacugagaaaga

SEQ ID NO: 63396 - RNA, 23 nt, Artificial Sequence
  Chemically synthesized
augcaaagugagaaauuguauuu

SEQ ID NO: 63397 - RNA, 23 nt, Artificial Sequence
  Chemically synthesized
cuuagauuuugaccucaguccau

SEQ ID NO: 63398 - RNA, 23 nt, Artificial Sequence
  Chemically synthesized
uuagauuuugaccucaguccaua

SEQ ID NO: 63399 - RNA, 23 nt, Artificial Sequence
  Chemically synthesized
ggucaucaucaucuucaucaucc

SEQ ID NO: 63400 - RNA, 23 nt, Artificial Sequence
  Chemically synthesized
gucaucaucaucuucaucaucca

SEQ ID NO: 63401 - RNA, 23 nt, Artificial Sequence
  Chemically synthesized
ucaucaucaucuucaucauccau

SEQ ID NO: 63402 - RNA, 23 nt, Artificial Sequence
  Chemically synthesized
caucaucaucuucaucauccaua

SEQ ID NO: 63403 - RNA, 23 nt, Artificial Sequence
  Chemically synthesized
aucaucaucuucaucauccauau

SEQ ID NO: 63404 - RNA, 23 nt, Artificial Sequence
  Chemically synthesized
uggacuuacuuggaagggucucu

SEQ ID NO: 63405 - RNA, 23 nt, Artificial Sequence
  Chemically synthesized
uuccucagaacuuccagaaucag

SEQ ID NO: 63406 - RNA, 23 nt, Artificial Sequence
  Chemically synthesized
uccucagaacuuccagaaucagc

SEQ ID NO: 63407 - RNA, 23 nt, Artificial Sequence
  Chemically synthesized
gcagacauccuccaccaacacag

SEQ ID NO: 63408 - RNA, 23 nt, Artificial Sequence
  Chemically synthesized
cagacauccuccaccaacacagg

SEQ ID NO: 63409 - RNA, 23 nt, Artificial Sequence
  Chemically synthesized
agacauccuccaccaacacaggg

SEQ ID NO: 63410 - RNA, 23 nt, Artificial Sequence
  Chemically synthesized
gacauccuccaccaacacaggga

SEQ ID NO: 63411 - RNA, 23 nt, Artificial Sequence
  Chemically synthesized
acauccuccaccaacacagggag

SEQ ID NO: 63412 - RNA, 23 nt, Artificial Sequence
  Chemically synthesized
aagauuuauucacaccacaaaaa

SEQ ID NO: 63413 - RNA, 23 nt, Artificial Sequence
  Chemically synthesized
auuuauucacaccacaaaaagau

SEQ ID NO: 63414 - RNA, 23 nt, Artificial Sequence
  Chemically synthesized
uuuauucacaccacaaaaagaua

SEQ ID NO: 63415 - RNA, 23 nt, Artificial Sequence
  Chemically synthesized
uuauucacaccacaaaaagauaa

SEQ ID NO: 63416 - RNA, 23 nt, Artificial Sequence
  Chemically synthesized
uauucacaccacaaaaagauaau

SEQ ID NO: 63417 - RNA, 23 nt, Artificial Sequence
  Chemically synthesized
auucacaccacaaaaagauaauc

SEQ ID NO: 63418 - RNA, 23 nt, Artificial Sequence
  Chemically synthesized
uaaacugagaaagaagcauuuca

SEQ ID NO: 63419 - RNA, 23 nt, Artificial Sequence
  Chemically synthesized
ucacugcaauucucaugguagug

SEQ ID NO: 63420 - RNA, 23 nt, Artificial Sequence
  Chemically synthesized
ccagcugacucguuucauaacug

SEQ ID NO: 63421 - RNA, 23 nt, Artificial Sequence
  Chemically synthesized
ugcaccauucaacuccucgcuuu

SEQ ID NO: 63422 - RNA, 23 nt, Artificial Sequence
  Chemically synthesized
uucucuuuuuaaguggguaaaag

SEQ ID NO: 63423 - RNA, 23 nt, Artificial Sequence
  Chemically synthesized
guggguaaaaguauuuuguuugc

SEQ ID NO: 63424 - RNA, 23 nt, Artificial Sequence
  Chemically synthesized
aaaaguauuuuguuugcuucuac

SEQ ID NO: 63425 - RNA, 23 nt, Artificial Sequence
  Chemically synthesized
aaaguauuuuguuugcuucuaca

SEQ ID NO: 63426 - RNA, 23 nt, Artificial Sequence
  Chemically synthesized
aaguauuuuguuugcuucuacau

SEQ ID NO: 63427 - RNA, 23 nt, Artificial Sequence
  Chemically synthesized
aguauuuuguuugcuucuacaua

SEQ ID NO: 63428 - RNA, 23 nt, Artificial Sequence
  Chemically synthesized
guauuuuguuugcuucuacauaa

SEQ ID NO: 63429 - RNA, 23 nt, Artificial Sequence
  Chemically synthesized
caugaagccacaaacuaaacuaa

SEQ ID NO: 63430 - RNA, 23 nt, Artificial Sequence
  Chemically synthesized
augaagccacaaacuaaacuaau

SEQ ID NO: 63431 - RNA, 23 nt, Artificial Sequence
  Chemically synthesized
ugaagccacaaacuaaacuaauu

SEQ ID NO: 63432 - RNA, 23 nt, Artificial Sequence
  Chemically synthesized
gaagccacaaacuaaacuaauua

SEQ ID NO: 63433 - RNA, 23 nt, Artificial Sequence
  Chemically synthesized
aagccacaaacuaaacuaauuau

SEQ ID NO: 63434 - RNA, 23 nt, Artificial Sequence
  Chemically synthesized
gacucaaauagauacacauucaa

SEQ ID NO: 63435 - RNA, 23 nt, Artificial Sequence
  Chemically synthesized
acucaaauagauacacauucaac

SEQ ID NO: 63436 - RNA, 23 nt, Artificial Sequence
  Chemically synthesized
ucaaccaauaaacugagaaagaa

SEQ ID NO: 63437 - RNA, 23 nt, Artificial Sequence
  Chemically synthesized
caaccaauaaacugagaaagaag

SEQ ID NO: 63438 - RNA, 23 nt, Artificial Sequence
  Chemically synthesized
aaagaagcauuucauguucucuu

SEQ ID NO: 63439 - RNA, 23 nt, Artificial Sequence
  Chemically synthesized
aagaagcauuucauguucucuuu

SEQ ID NO: 63440 - RNA, 23 nt, Artificial Sequence
  Chemically synthesized
agaagcauuucauguucucuuuc

SEQ ID NO: 63441 - RNA, 23 nt, Artificial Sequence
  Chemically synthesized
gcacuaucuaauucaugagaaau

SEQ ID NO: 63442 - RNA, 23 nt, Artificial Sequence
  Chemically synthesized
cacuaucuaauucaugagaaaua

SEQ ID NO: 63443 - RNA, 23 nt, Artificial Sequence
  Chemically synthesized
uucauaacuguccuucccacggc

SEQ ID NO: 63444 - RNA, 23 nt, Artificial Sequence
  Chemically synthesized
gcaccauucaacuccucgcuuuc

SEQ ID NO: 63445 - RNA, 23 nt, Artificial Sequence
  Chemically synthesized
ccacacuaucaccucggccauca

SEQ ID NO: 63446 - RNA, 23 nt, Artificial Sequence
  Chemically synthesized
cacacuaucaccucggccaucau

SEQ ID NO: 63447 - RNA, 23 nt, Artificial Sequence
  Chemically synthesized
acacuaucaccucggccaucaua

SEQ ID NO: 63448 - RNA, 23 nt, Artificial Sequence
  Chemically synthesized
cacuaucaccucggccaucauau

SEQ ID NO: 63449 - RNA, 23 nt, Artificial Sequence
  Chemically synthesized
acuaucaccucggccaucauaug

SEQ ID NO: 63450 - RNA, 23 nt, Artificial Sequence
  Chemically synthesized
aauacagugauaguuugcauuuc

SEQ ID NO: 63451 - RNA, 23 nt, Artificial Sequence
  Chemically synthesized
auacagugauaguuugcauuucu

SEQ ID NO: 63452 - RNA, 23 nt, Artificial Sequence
  Chemically synthesized
ggaguuuccaugaagccacaaac

SEQ ID NO: 63453 - RNA, 23 nt, Artificial Sequence
  Chemically synthesized
gaguuuccaugaagccacaaacu

SEQ ID NO: 63454 - RNA, 23 nt, Artificial Sequence
  Chemically synthesized
aguuuccaugaagccacaaacua

SEQ ID NO: 63455 - RNA, 23 nt, Artificial Sequence
  Chemically synthesized
guuuccaugaagccacaaacuaa

SEQ ID NO: 63456 - RNA, 23 nt, Artificial Sequence
  Chemically synthesized
uuuccaugaagccacaaacuaaa

SEQ ID NO: 63457 - RNA, 23 nt, Artificial Sequence
  Chemically synthesized
aaagcaaaucacugcaauucuca

SEQ ID NO: 63458 - RNA, 23 nt, Artificial Sequence
  Chemically synthesized
aagcaaaucacugcaauucucau

SEQ ID NO: 63459 - RNA, 23 nt, Artificial Sequence
  Chemically synthesized
uacagugauaguuugcauuucuu

SEQ ID NO: 63460 - RNA, 23 nt, Artificial Sequence
  Chemically synthesized
uguuuaacugguauggcacaggu

SEQ ID NO: 63461 - RNA, 23 nt, Artificial Sequence
  Chemically synthesized
guuuaacugguauggcacaggug

SEQ ID NO: 63462 - RNA, 23 nt, Artificial Sequence
  Chemically synthesized
uuuaacugguauggcacagguga

SEQ ID NO: 63463 - RNA, 23 nt, Artificial Sequence
  Chemically synthesized
uuaacugguauggcacaggugau

SEQ ID NO: 63464 - RNA, 23 nt, Artificial Sequence
  Chemically synthesized
uaacugguauggcacaggugaug

SEQ ID NO: 63465 - RNA, 23 nt, Artificial Sequence
  Chemically synthesized
aaacugagaaagaagcauuucau

SEQ ID NO: 63466 - RNA, 23 nt, Artificial Sequence
  Chemically synthesized
auuucauguucucuuucauuuug

SEQ ID NO: 63467 - RNA, 23 nt, Artificial Sequence
  Chemically synthesized
ucauaacuguccuucccacggcu

SEQ ID NO: 63468 - RNA, 23 nt, Artificial Sequence
  Chemically synthesized
ugaccucaguccauaaaccacac

SEQ ID NO: 63469 - RNA, 23 nt, Artificial Sequence
  Chemically synthesized
gaccucaguccauaaaccacacu

SEQ ID NO: 63470 - RNA, 23 nt, Artificial Sequence
  Chemically synthesized
accucaguccauaaaccacacua

SEQ ID NO: 63471 - RNA, 23 nt, Artificial Sequence
  Chemically synthesized
ccucaguccauaaaccacacuau

SEQ ID NO: 63472 - RNA, 23 nt, Artificial Sequence
  Chemically synthesized
cucaguccauaaaccacacuauc

SEQ ID NO: 63473 - RNA, 23 nt, Artificial Sequence
  Chemically synthesized
aggguacuggaugucaggucugc

SEQ ID NO: 63474 - RNA, 23 nt, Artificial Sequence
  Chemically synthesized
ggguacuggaugucaggucugcg

SEQ ID NO: 63475 - RNA, 23 nt, Artificial Sequence
  Chemically synthesized
gguacuggaugucaggucugcga

SEQ ID NO: 63476 - RNA, 23 nt, Artificial Sequence
  Chemically synthesized
guacuggaugucaggucugcgaa

SEQ ID NO: 63477 - RNA, 23 nt, Artificial Sequence
  Chemically synthesized
uacuggaugucaggucugcgaaa

SEQ ID NO: 63478 - RNA, 23 nt, Artificial Sequence
  Chemically synthesized
aguccauaaaccacacuaucacc

SEQ ID NO: 63479 - RNA, 23 nt, Artificial Sequence
  Chemically synthesized
cauggucaucaucaucuucauca

SEQ ID NO: 63480 - RNA, 23 nt, Artificial Sequence
  Chemically synthesized
auggucaucaucaucuucaucau

SEQ ID NO: 63481 - RNA, 23 nt, Artificial Sequence
  Chemically synthesized
uggucaucaucaucuucaucauc

SEQ ID NO: 63482 - RNA, 23 nt, Artificial Sequence
  Chemically synthesized
ccugaagcuuuuaguuuacaggg

SEQ ID NO: 63483 - RNA, 23 nt, Artificial Sequence
  Chemically synthesized
cuucauggcugugaaauucaugg

SEQ ID NO: 63484 - RNA, 23 nt, Artificial Sequence
  Chemically synthesized
uucauggcugugaaauucauggc

SEQ ID NO: 63485 - RNA, 23 nt, Artificial Sequence
  Chemically synthesized
ucauggcugugaaauucauggcu

SEQ ID NO: 63486 - RNA, 23 nt, Artificial Sequence
  Chemically synthesized
cauggcugugaaauucauggcug

SEQ ID NO: 63487 - RNA, 23 nt, Artificial Sequence
  Chemically synthesized
auggcugugaaauucauggcugu

SEQ ID NO: 63488 - RNA, 23 nt, Artificial Sequence
  Chemically synthesized
ugagaaagaagcauuucauguuc

SEQ ID NO: 63489 - RNA, 23 nt, Artificial Sequence
  Chemically synthesized
gagaaagaagcauuucauguucu

SEQ ID NO: 63490 - RNA, 23 nt, Artificial Sequence
  Chemically synthesized
agaaagaagcauuucauguucuc

SEQ ID NO: 63491 - RNA, 23 nt, Artificial Sequence
  Chemically synthesized
gaaagaagcauuucauguucucu

SEQ ID NO: 63492 - RNA, 23 nt, Artificial Sequence
  Chemically synthesized
gucguucgagucaauggaguccu

SEQ ID NO: 63493 - RNA, 23 nt, Artificial Sequence
  Chemically synthesized
ucguucgagucaauggaguccug

SEQ ID NO: 63494 - RNA, 23 nt, Artificial Sequence
  Chemically synthesized
cguucgagucaauggaguccugg

SEQ ID NO: 63495 - RNA, 23 nt, Artificial Sequence
  Chemically synthesized
guucgagucaauggaguccuggc

SEQ ID NO: 63496 - RNA, 23 nt, Artificial Sequence
  Chemically synthesized
uucgagucaauggaguccuggcu

SEQ ID NO: 63497 - RNA, 23 nt, Artificial Sequence
  Chemically synthesized
cauccauaucauccaugugguca

SEQ ID NO: 63498 - RNA, 23 nt, Artificial Sequence
  Chemically synthesized
auccauaucauccauguggucau

SEQ ID NO: 63499 - RNA, 23 nt, Artificial Sequence
  Chemically synthesized
auuaauugcuggacaaccguggg

SEQ ID NO: 63500 - RNA, 23 nt, Artificial Sequence
  Chemically synthesized
acaaccagcauaucuucauggcu

SEQ ID NO: 63501 - RNA, 23 nt, Artificial Sequence
  Chemically synthesized
caaccagcauaucuucauggcug

SEQ ID NO: 63502 - RNA, 23 nt, Artificial Sequence
  Chemically synthesized
aaccagcauaucuucauggcugu

SEQ ID NO: 63503 - RNA, 23 nt, Artificial Sequence
  Chemically synthesized
aaaucagugaccaguucaucaga

SEQ ID NO: 63504 - RNA, 23 nt, Artificial Sequence
  Chemically synthesized
aaucagugaccaguucaucagau

SEQ ID NO: 63505 - RNA, 23 nt, Artificial Sequence
  Chemically synthesized
aucagugaccaguucaucagauu

SEQ ID NO: 63506 - RNA, 23 nt, Artificial Sequence
  Chemically synthesized
ucagugaccaguucaucagauuc

SEQ ID NO: 63507 - RNA, 23 nt, Artificial Sequence
  Chemically synthesized
ucagauucaucagaauggugaga

SEQ ID NO: 63508 - RNA, 23 nt, Artificial Sequence
  Chemically synthesized
uguccacauggucaucaucaucu

SEQ ID NO: 63509 - RNA, 23 nt, Artificial Sequence
  Chemically synthesized
guccacauggucaucaucaucuu

SEQ ID NO: 63510 - RNA, 23 nt, Artificial Sequence
  Chemically synthesized
uccacauggucaucaucaucuuc

SEQ ID NO: 63511 - RNA, 23 nt, Artificial Sequence
  Chemically synthesized
ccacauggucaucaucaucuuca

SEQ ID NO: 63512 - RNA, 23 nt, Artificial Sequence
  Chemically synthesized
cacauggucaucaucaucuucau

SEQ ID NO: 63513 - RNA, 23 nt, Artificial Sequence
  Chemically synthesized
aagcugcuuuuccucagaacuuc

SEQ ID NO: 63514 - RNA, 23 nt, Artificial Sequence
  Chemically synthesized
agcugcuuuuccucagaacuucc

SEQ ID NO: 63515 - RNA, 23 nt, Artificial Sequence
  Chemically synthesized
uuaauugcuggacaaccguggga

SEQ ID NO: 63516 - RNA, 23 nt, Artificial Sequence
  Chemically synthesized
uaauugcuggacaaccgugggaa

SEQ ID NO: 63517 - RNA, 23 nt, Artificial Sequence
  Chemically synthesized
aauugcuggacaaccgugggaaa

SEQ ID NO: 63518 - RNA, 23 nt, Artificial Sequence
  Chemically synthesized
cccugaagcuuuuaguuuacagg

SEQ ID NO: 63519 - RNA, 23 nt, Artificial Sequence
  Chemically synthesized
uggcugugaaauucauggcugug

SEQ ID NO: 63520 - RNA, 23 nt, Artificial Sequence
  Chemically synthesized
ggcugacuuuggaaaguuccuga

SEQ ID NO: 63521 - RNA, 23 nt, Artificial Sequence
  Chemically synthesized
gcugacuuuggaaaguuccugac

SEQ ID NO: 63522 - RNA, 23 nt, Artificial Sequence
  Chemically synthesized
cugacuuuggaaaguuccugacu

SEQ ID NO: 63523 - RNA, 23 nt, Artificial Sequence
  Chemically synthesized
ugacuuuggaaaguuccugacua

SEQ ID NO: 63524 - RNA, 23 nt, Artificial Sequence
  Chemically synthesized
gacuuuggaaaguuccugacuau

SEQ ID NO: 63525 - RNA, 23 nt, Artificial Sequence
  Chemically synthesized
ucauaugugucuacuguggggac

SEQ ID NO: 63526 - RNA, 23 nt, Artificial Sequence
  Chemically synthesized
gugggaaaaucagugaccaguuc

SEQ ID NO: 63527 - RNA, 23 nt, Artificial Sequence
  Chemically synthesized
ucaucaucuucaucauccauauc

SEQ ID NO: 63528 - RNA, 23 nt, Artificial Sequence
  Chemically synthesized
gaauuuaaaugcugcugcagaca

SEQ ID NO: 63529 - RNA, 23 nt, Artificial Sequence
  Chemically synthesized
aauuuaaaugcugcugcagacau

SEQ ID NO: 63530 - RNA, 23 nt, Artificial Sequence
  Chemically synthesized
auuuaaaugcugcugcagacauc

SEQ ID NO: 63531 - RNA, 23 nt, Artificial Sequence
  Chemically synthesized
uuuaaaugcugcugcagacaucc

SEQ ID NO: 63532 - RNA, 23 nt, Artificial Sequence
  Chemically synthesized
aucagccuguuuaacugguaugg

SEQ ID NO: 63533 - RNA, 23 nt, Artificial Sequence
  Chemically synthesized
ucagccuguuuaacugguauggc

SEQ ID NO: 63534 - RNA, 23 nt, Artificial Sequence
  Chemically synthesized
acccugaagcuuuuaguuuacag

SEQ ID NO: 63535 - RNA, 23 nt, Artificial Sequence
  Chemically synthesized
aguuuacagggaguuuccaugaa

SEQ ID NO: 63536 - RNA, 23 nt, Artificial Sequence
  Chemically synthesized
guuuacagggaguuuccaugaag

SEQ ID NO: 63537 - RNA, 23 nt, Artificial Sequence
  Chemically synthesized
uuuacagggaguuuccaugaagc

SEQ ID NO: 63538 - RNA, 23 nt, Artificial Sequence
  Chemically synthesized
cggcugacuuuggaaaguuccug

SEQ ID NO: 63539 - RNA, 23 nt, Artificial Sequence
  Chemically synthesized
acuuuggaaaguuccugacuauc

SEQ ID NO: 63540 - RNA, 23 nt, Artificial Sequence
  Chemically synthesized
caucggaaugcucauugcucuca

SEQ ID NO: 63541 - RNA, 23 nt, Artificial Sequence
  Chemically synthesized
aucggaaugcucauugcucucau

SEQ ID NO: 63542 - RNA, 23 nt, Artificial Sequence
  Chemically synthesized
ucggaaugcucauugcucucauc

SEQ ID NO: 63543 - RNA, 23 nt, Artificial Sequence
  Chemically synthesized
cgcuuuccaugugugaggugaug

SEQ ID NO: 63544 - RNA, 23 nt, Artificial Sequence
  Chemically synthesized
gcuuuccaugugugaggugaugu

SEQ ID NO: 63545 - RNA, 23 nt, Artificial Sequence
  Chemically synthesized
cuuuccaugugugaggugauguc

SEQ ID NO: 63546 - RNA, 23 nt, Artificial Sequence
  Chemically synthesized
uagauuuugaccucaguccauaa

SEQ ID NO: 63547 - RNA, 23 nt, Artificial Sequence
  Chemically synthesized
gagugaaaacuucgguugcuggc

SEQ ID NO: 63548 - RNA, 23 nt, Artificial Sequence
  Chemically synthesized
agugaaaacuucgguugcuggca

SEQ ID NO: 63549 - RNA, 23 nt, Artificial Sequence
  Chemically synthesized
gugaaaacuucgguugcuggcag

SEQ ID NO: 63550 - RNA, 23 nt, Artificial Sequence
  Chemically synthesized
ugaaaacuucgguugcuggcagg

SEQ ID NO: 63551 - RNA, 23 nt, Artificial Sequence
  Chemically synthesized
gaaaacuucgguugcuggcaggu

SEQ ID NO: 63552 - RNA, 23 nt, Artificial Sequence
  Chemically synthesized
aaaacuucgguugcuggcagguc

SEQ ID NO: 63553 - RNA, 23 nt, Artificial Sequence
  Chemically synthesized
uccauaucauccauguggucaug

SEQ ID NO: 63554 - RNA, 23 nt, Artificial Sequence
  Chemically synthesized
ccauaucauccauguggucaugg

SEQ ID NO: 63555 - RNA, 23 nt, Artificial Sequence
  Chemically synthesized
cauaucauccauguggucauggc

SEQ ID NO: 63556 - RNA, 23 nt, Artificial Sequence
  Chemically synthesized
auaucauccauguggucauggcu

SEQ ID NO: 63557 - RNA, 23 nt, Artificial Sequence
  Chemically synthesized
cauccauguggucauggcuuucg

SEQ ID NO: 63558 - RNA, 23 nt, Artificial Sequence
  Chemically synthesized
auccauguggucauggcuuucgu

SEQ ID NO: 63559 - RNA, 23 nt, Artificial Sequence
  Chemically synthesized
uccauguggucauggcuuucguu

SEQ ID NO: 63560 - RNA, 23 nt, Artificial Sequence
  Chemically synthesized
ccauguggucauggcuuucguug

SEQ ID NO: 63561 - RNA, 23 nt, Artificial Sequence
  Chemically synthesized
cauguggucauggcuuucguugg

SEQ ID NO: 63562 - RNA, 23 nt, Artificial Sequence
  Chemically synthesized
aaucagccuguuuaacugguaug

SEQ ID NO: 63563 - RNA, 23 nt, Artificial Sequence
  Chemically synthesized
cuucuuccuuacuuuuggggucu

SEQ ID NO: 63564 - RNA, 23 nt, Artificial Sequence
  Chemically synthesized
accagcauaucuucauggcugug

SEQ ID NO: 63565 - RNA, 23 nt, Artificial Sequence
  Chemically synthesized
augugugaggugauguccucguc

SEQ ID NO: 63566 - RNA, 23 nt, Artificial Sequence
  Chemically synthesized
ugugugaggugauguccucgucu

SEQ ID NO: 63567 - RNA, 23 nt, Artificial Sequence
  Chemically synthesized
gugugaggugauguccucgucug

SEQ ID NO: 63568 - RNA, 23 nt, Artificial Sequence
  Chemically synthesized
ugugaggugauguccucgucugu

SEQ ID NO: 63569 - RNA, 23 nt, Artificial Sequence
  Chemically synthesized
gacaacuggagugaaaacuucgg

SEQ ID NO: 63570 - RNA, 23 nt, Artificial Sequence
  Chemically synthesized
acaacuggagugaaaacuucggu

SEQ ID NO: 63571 - RNA, 23 nt, Artificial Sequence
  Chemically synthesized
caacuggagugaaaacuucgguu

SEQ ID NO: 63572 - RNA, 23 nt, Artificial Sequence
  Chemically synthesized
aacuggagugaaaacuucgguug

SEQ ID NO: 63573 - RNA, 23 nt, Artificial Sequence
  Chemically synthesized
acuggagugaaaacuucgguugc

SEQ ID NO: 63574 - RNA, 23 nt, Artificial Sequence
  Chemically synthesized
cuggagugaaaacuucgguugcu

SEQ ID NO: 63575 - RNA, 23 nt, Artificial Sequence
  Chemically synthesized
uggagugaaaacuucgguugcug

SEQ ID NO: 63576 - RNA, 23 nt, Artificial Sequence
  Chemically synthesized
ggagugaaaacuucgguugcugg

SEQ ID NO: 63577 - RNA, 23 nt, Artificial Sequence
  Chemically synthesized
agucguucgagucaauggagucc

SEQ ID NO: 63578 - RNA, 23 nt, Artificial Sequence
  Chemically synthesized
cgagucaauggaguccuggcugu

SEQ ID NO: 63579 - RNA, 23 nt, Artificial Sequence
  Chemically synthesized
gagucaauggaguccuggcuguc

SEQ ID NO: 63580 - RNA, 23 nt, Artificial Sequence
  Chemically synthesized
agucaauggaguccuggcugucc

SEQ ID NO: 63581 - RNA, 23 nt, Artificial Sequence
  Chemically synthesized
gucaauggaguccuggcugucca

SEQ ID NO: 63582 - RNA, 23 nt, Artificial Sequence
  Chemically synthesized
ucaauggaguccuggcuguccac

SEQ ID NO: 63583 - RNA, 23 nt, Artificial Sequence
  Chemically synthesized
acauggucaucaucaucuucauc

SEQ ID NO: 63584 - RNA, 23 nt, Artificial Sequence
  Chemically synthesized
auguggucauggcuuucguugga

SEQ ID NO: 63585 - RNA, 23 nt, Artificial Sequence
  Chemically synthesized
aacugagaaagaagcauuucaug

SEQ ID NO: 63586 - RNA, 23 nt, Artificial Sequence
  Chemically synthesized
caugagaaauacgaaauuucagg

SEQ ID NO: 63587 - RNA, 23 nt, Artificial Sequence
  Chemically synthesized
augagaaauacgaaauuucaggu

SEQ ID NO: 63588 - RNA, 23 nt, Artificial Sequence
  Chemically synthesized
ccagcauaucuucauggcuguga

SEQ ID NO: 63589 - RNA, 23 nt, Artificial Sequence
  Chemically synthesized
cagcauaucuucauggcugugaa

SEQ ID NO: 63590 - RNA, 23 nt, Artificial Sequence
  Chemically synthesized
agcauaucuucauggcugugaaa

SEQ ID NO: 63591 - RNA, 23 nt, Artificial Sequence
  Chemically synthesized
gcauaucuucauggcugugaaau

SEQ ID NO: 63592 - RNA, 23 nt, Artificial Sequence
  Chemically synthesized
cauaucuucauggcugugaaauu

SEQ ID NO: 63593 - RNA, 23 nt, Artificial Sequence
  Chemically synthesized
cuuuggaaaguuccugacuauca

SEQ ID NO: 63594 - RNA, 23 nt, Artificial Sequence
  Chemically synthesized
uuuggaaaguuccugacuaucaa

SEQ ID NO: 63595 - RNA, 23 nt, Artificial Sequence
  Chemically synthesized
uuggaaaguuccugacuaucaau

SEQ ID NO: 63596 - RNA, 23 nt, Artificial Sequence
  Chemically synthesized
gcaaaagcaaaucacugcaauuc

SEQ ID NO: 63597 - RNA, 23 nt, Artificial Sequence
  Chemically synthesized
caaaagcaaaucacugcaauucu

SEQ ID NO: 63598 - RNA, 23 nt, Artificial Sequence
  Chemically synthesized
aaaagcaaaucacugcaauucuc

SEQ ID NO: 63599 - RNA, 23 nt, Artificial Sequence
  Chemically synthesized
ugaggugauguccucgucuguag

SEQ ID NO: 63600 - RNA, 23 nt, Artificial Sequence
  Chemically synthesized
gaggugauguccucgucuguagc

SEQ ID NO: 63601 - RNA, 23 nt, Artificial Sequence
  Chemically synthesized
aggugauguccucgucuguagca

SEQ ID NO: 63602 - RNA, 23 nt, Artificial Sequence
  Chemically synthesized
auucucaugguagugaguuuucc

SEQ ID NO: 63603 - RNA, 23 nt, Artificial Sequence
  Chemically synthesized
uucucaugguagugaguuuuccu

SEQ ID NO: 63604 - RNA, 23 nt, Artificial Sequence
  Chemically synthesized
ggacaacuggagugaaaacuucg

SEQ ID NO: 63605 - RNA, 23 nt, Artificial Sequence
  Chemically synthesized
aaacuucgguugcuggcaggucc

SEQ ID NO: 63606 - RNA, 23 nt, Artificial Sequence
  Chemically synthesized
cagauucaucagaauggugagac

SEQ ID NO: 63607 - RNA, 23 nt, Artificial Sequence
  Chemically synthesized
agauucaucagaauggugagacu

SEQ ID NO: 63608 - RNA, 23 nt, Artificial Sequence
  Chemically synthesized
gauucaucagaauggugagacuc

SEQ ID NO: 63609 - RNA, 23 nt, Artificial Sequence
  Chemically synthesized
ucagaauggugagacucaucaga

SEQ ID NO: 63610 - RNA, 23 nt, Artificial Sequence
  Chemically synthesized
cagaauggugagacucaucagac

SEQ ID NO: 63611 - RNA, 23 nt, Artificial Sequence
  Chemically synthesized
agaauggugagacucaucagacu

SEQ ID NO: 63612 - RNA, 23 nt, Artificial Sequence
  Chemically synthesized
gaauggugagacucaucagacug

SEQ ID NO: 63613 - RNA, 23 nt, Artificial Sequence
  Chemically synthesized
aauggugagacucaucagacugg

SEQ ID NO: 63614 - RNA, 23 nt, Artificial Sequence
  Chemically synthesized
agauuuauucacaccacaaaaag

SEQ ID NO: 63615 - RNA, 23 nt, Artificial Sequence
  Chemically synthesized
gauuuauucacaccacaaaaaga

SEQ ID NO: 63616 - RNA, 23 nt, Artificial Sequence
  Chemically synthesized
uucuuuugacuaaaugcaaagug

SEQ ID NO: 63617 - RNA, 23 nt, Artificial Sequence
  Chemically synthesized
ucagaagaugcacuaucuaauuc

SEQ ID NO: 63618 - RNA, 23 nt, Artificial Sequence
  Chemically synthesized
cagaagaugcacuaucuaauuca

SEQ ID NO: 63619 - RNA, 23 nt, Artificial Sequence
  Chemically synthesized
agaagaugcacuaucuaauucau

SEQ ID NO: 63620 - RNA, 23 nt, Artificial Sequence
  Chemically synthesized
gaagaugcacuaucuaauucaug

SEQ ID NO: 63621 - RNA, 23 nt, Artificial Sequence
  Chemically synthesized
ucaucauuggcuuuccgcuuaua

SEQ ID NO: 63622 - RNA, 23 nt, Artificial Sequence
  Chemically synthesized
caucauuggcuuuccgcuuauau

SEQ ID NO: 63623 - RNA, 23 nt, Artificial Sequence
  Chemically synthesized
aucauuggcuuuccgcuuauaua

SEQ ID NO: 63624 - RNA, 23 nt, Artificial Sequence
  Chemically synthesized
cagcacucuggucauccagcuga

SEQ ID NO: 63625 - RNA, 23 nt, Artificial Sequence
  Chemically synthesized
agcacucuggucauccagcugac

SEQ ID NO: 63626 - RNA, 23 nt, Artificial Sequence
  Chemically synthesized
gcacucuggucauccagcugacu

SEQ ID NO: 63627 - RNA, 23 nt, Artificial Sequence
  Chemically synthesized
cacucuggucauccagcugacuc

SEQ ID NO: 63628 - RNA, 23 nt, Artificial Sequence
  Chemically synthesized
acucuggucauccagcugacucg

SEQ ID NO: 63629 - RNA, 23 nt, Artificial Sequence
  Chemically synthesized
auggugagacucaucagacuggu

SEQ ID NO: 63630 - RNA, 23 nt, Artificial Sequence
  Chemically synthesized
uggugagacucaucagacuggug

SEQ ID NO: 63631 - RNA, 23 nt, Artificial Sequence
  Chemically synthesized
ggugagacucaucagacugguga

SEQ ID NO: 63632 - RNA, 23 nt, Artificial Sequence
  Chemically synthesized
gugagacucaucagacuggugag

SEQ ID NO: 63633 - RNA, 23 nt, Artificial Sequence
  Chemically synthesized
uaucauccauguggucauggcuu

SEQ ID NO: 63634 - RNA, 23 nt, Artificial Sequence
  Chemically synthesized
aucauccauguggucauggcuuu

SEQ ID NO: 63635 - RNA, 23 nt, Artificial Sequence
  Chemically synthesized
ucauccauguggucauggcuuuc

SEQ ID NO: 63636 - RNA, 23 nt, Artificial Sequence
  Chemically synthesized
uuacagggaguuuccaugaagcc

SEQ ID NO: 63637 - RNA, 23 nt, Artificial Sequence
  Chemically synthesized
uacagggaguuuccaugaagcca

SEQ ID NO: 63638 - RNA, 23 nt, Artificial Sequence
  Chemically synthesized
cggaaugcucauugcucucauca

SEQ ID NO: 63639 - RNA, 23 nt, Artificial Sequence
  Chemically synthesized
ggaaugcucauugcucucaucau

SEQ ID NO: 63640 - RNA, 23 nt, Artificial Sequence
  Chemically synthesized
gaaugcucauugcucucaucauu

SEQ ID NO: 63641 - RNA, 23 nt, Artificial Sequence
  Chemically synthesized
aaugcucauugcucucaucauug

SEQ ID NO: 63642 - RNA, 23 nt, Artificial Sequence
  Chemically synthesized
uggguuucagcacucuggucauc

SEQ ID NO: 63643 - RNA, 23 nt, Artificial Sequence
  Chemically synthesized
ggguuucagcacucuggucaucc

SEQ ID NO: 63644 - RNA, 23 nt, Artificial Sequence
  Chemically synthesized
gguuucagcacucuggucaucca

SEQ ID NO: 63645 - RNA, 23 nt, Artificial Sequence
  Chemically synthesized
guuucagcacucuggucauccag

SEQ ID NO: 63646 - RNA, 23 nt, Artificial Sequence
  Chemically synthesized
uuucagcacucuggucauccagc

SEQ ID NO: 63647 - RNA, 23 nt, Artificial Sequence
  Chemically synthesized
ccucggccaucauaugugucuac

SEQ ID NO: 63648 - RNA, 23 nt, Artificial Sequence
  Chemically synthesized
cucggccaucauaugugucuacu

SEQ ID NO: 63649 - RNA, 23 nt, Artificial Sequence
  Chemically synthesized
ucggccaucauaugugucuacug

SEQ ID NO: 63650 - RNA, 23 nt, Artificial Sequence
  Chemically synthesized
uguggucauggcuuucguuggac

SEQ ID NO: 63651 - RNA, 23 nt, Artificial Sequence
  Chemically synthesized
guggucauggcuuucguuggacu

SEQ ID NO: 63652 - RNA, 23 nt, Artificial Sequence
  Chemically synthesized
uggucauggcuuucguuggacuu

SEQ ID NO: 63653 - RNA, 23 nt, Artificial Sequence
  Chemically synthesized
uucagcacucuggucauccagcu

SEQ ID NO: 63654 - RNA, 23 nt, Artificial Sequence
  Chemically synthesized
cuccucgcuuuccaugugugagg

SEQ ID NO: 63655 - RNA, 23 nt, Artificial Sequence
  Chemically synthesized
uccucgcuuuccaugugugaggu

SEQ ID NO: 63656 - RNA, 23 nt, Artificial Sequence
  Chemically synthesized
ccucgcuuuccaugugugaggug

SEQ ID NO: 63657 - RNA, 23 nt, Artificial Sequence
  Chemically synthesized
cucgcuuuccaugugugagguga

SEQ ID NO: 63658 - RNA, 23 nt, Artificial Sequence
  Chemically synthesized
ucgcuuuccaugugugaggugau

SEQ ID NO: 63659 - RNA, 23 nt, Artificial Sequence
  Chemically synthesized
cgucuguagcaucaggguacugg

SEQ ID NO: 63660 - RNA, 23 nt, Artificial Sequence
  Chemically synthesized
gucuguagcaucaggguacugga

SEQ ID NO: 63661 - RNA, 23 nt, Artificial Sequence
  Chemically synthesized
ucuguagcaucaggguacuggau

SEQ ID NO: 63662 - RNA, 23 nt, Artificial Sequence
  Chemically synthesized
cuguagcaucaggguacuggaug

SEQ ID NO: 63663 - RNA, 23 nt, Artificial Sequence
  Chemically synthesized
uguagcaucaggguacuggaugu

SEQ ID NO: 63664 - RNA, 23 nt, Artificial Sequence
  Chemically synthesized
cauaugugucuacuguggggaca

SEQ ID NO: 63665 - RNA, 23 nt, Artificial Sequence
  Chemically synthesized
gggacaacuggagugaaaacuuc

SEQ ID NO: 63666 - RNA, 23 nt, Artificial Sequence
  Chemically synthesized
ucgagucaauggaguccuggcug

SEQ ID NO: 63667 - RNA, 23 nt, Artificial Sequence
  Chemically synthesized
gaacuuccagaaucagccuguuu

SEQ ID NO: 63668 - RNA, 23 nt, Artificial Sequence
  Chemically synthesized
aacuuccagaaucagccuguuua

SEQ ID NO: 63669 - RNA, 23 nt, Artificial Sequence
  Chemically synthesized
ugccuaggaggcaaaagcaaauc

SEQ ID NO: 63670 - RNA, 23 nt, Artificial Sequence
  Chemically synthesized
gccuaggaggcaaaagcaaauca

SEQ ID NO: 63671 - RNA, 23 nt, Artificial Sequence
  Chemically synthesized
ccuaggaggcaaaagcaaaucac

SEQ ID NO: 63672 - RNA, 23 nt, Artificial Sequence
  Chemically synthesized
cuaggaggcaaaagcaaaucacu

SEQ ID NO: 63673 - RNA, 23 nt, Artificial Sequence
  Chemically synthesized
uaggaggcaaaagcaaaucacug

SEQ ID NO: 63674 - RNA, 23 nt, Artificial Sequence
  Chemically synthesized
auaucuucauggcugugaaauuc

SEQ ID NO: 63675 - RNA, 23 nt, Artificial Sequence
  Chemically synthesized
ugaaauucauggcuguggaauuc

SEQ ID NO: 63676 - RNA, 23 nt, Artificial Sequence
  Chemically synthesized
gaaauucauggcuguggaauuca

SEQ ID NO: 63677 - RNA, 23 nt, Artificial Sequence
  Chemically synthesized
aaauucauggcuguggaauucac

SEQ ID NO: 63678 - RNA, 23 nt, Artificial Sequence
  Chemically synthesized
aauucauggcuguggaauucacg

SEQ ID NO: 63679 - RNA, 23 nt, Artificial Sequence
  Chemically synthesized
auucauggcuguggaauucacgg

SEQ ID NO: 63680 - RNA, 23 nt, Artificial Sequence
  Chemically synthesized
acuccucgcuuuccaugugugag

SEQ ID NO: 63681 - RNA, 23 nt, Artificial Sequence
  Chemically synthesized
caucagacuggugagaaucauca

SEQ ID NO: 63682 - RNA, 23 nt, Artificial Sequence
  Chemically synthesized
aucagacuggugagaaucaucag

SEQ ID NO: 63683 - RNA, 23 nt, Artificial Sequence
  Chemically synthesized
ucagacuggugagaaucaucagu

SEQ ID NO: 63684 - RNA, 23 nt, Artificial Sequence
  Chemically synthesized
cagacuggugagaaucaucagug

SEQ ID NO: 63685 - RNA, 23 nt, Artificial Sequence
  Chemically synthesized
agacuggugagaaucaucagugu

SEQ ID NO: 63686 - RNA, 23 nt, Artificial Sequence
  Chemically synthesized
gacuggugagaaucaucaguguc

SEQ ID NO: 63687 - RNA, 23 nt, Artificial Sequence
  Chemically synthesized
acuggugagaaucaucaguguca

SEQ ID NO: 63688 - RNA, 23 nt, Artificial Sequence
  Chemically synthesized
cuggugagaaucaucagugucau

SEQ ID NO: 63689 - RNA, 23 nt, Artificial Sequence
  Chemically synthesized
uggugagaaucaucagugucauc

SEQ ID NO: 63690 - RNA, 23 nt, Artificial Sequence
  Chemically synthesized
ggucauggcuuucguuggacuua

SEQ ID NO: 63691 - RNA, 23 nt, Artificial Sequence
  Chemically synthesized
auucacggcugacuuuggaaagu

SEQ ID NO: 63692 - RNA, 23 nt, Artificial Sequence
  Chemically synthesized
guggcuguggguuucagcacucu

SEQ ID NO: 63693 - RNA, 23 nt, Artificial Sequence
  Chemically synthesized
uggcuguggguuucagcacucug

SEQ ID NO: 63694 - RNA, 23 nt, Artificial Sequence
  Chemically synthesized
ggcuguggguuucagcacucugg

SEQ ID NO: 63695 - RNA, 23 nt, Artificial Sequence
  Chemically synthesized
gcuguggguuucagcacucuggu

SEQ ID NO: 63696 - RNA, 23 nt, Artificial Sequence
  Chemically synthesized
cuguggguuucagcacucugguc

SEQ ID NO: 63697 - RNA, 23 nt, Artificial Sequence
  Chemically synthesized
acugcaauucucaugguagugag

SEQ ID NO: 63698 - RNA, 23 nt, Artificial Sequence
  Chemically synthesized
cugcaauucucaugguagugagu

SEQ ID NO: 63699 - RNA, 23 nt, Artificial Sequence
  Chemically synthesized
ugcaauucucaugguagugaguu

SEQ ID NO: 63700 - RNA, 23 nt, Artificial Sequence
  Chemically synthesized
gcaauucucaugguagugaguuu

SEQ ID NO: 63701 - RNA, 23 nt, Artificial Sequence
  Chemically synthesized
caauucucaugguagugaguuuu

SEQ ID NO: 63702 - RNA, 23 nt, Artificial Sequence
  Chemically synthesized
ugagacucaucagacuggugaga

SEQ ID NO: 63703 - RNA, 23 nt, Artificial Sequence
  Chemically synthesized
gagacucaucagacuggugagaa

SEQ ID NO: 63704 - RNA, 23 nt, Artificial Sequence
  Chemically synthesized
agacucaucagacuggugagaau

SEQ ID NO: 63705 - RNA, 23 nt, Artificial Sequence
  Chemically synthesized
gacaaccgugggaaaacaaauaa

SEQ ID NO: 63706 - RNA, 23 nt, Artificial Sequence
  Chemically synthesized
acaaccgugggaaaacaaauaag

SEQ ID NO: 63707 - RNA, 23 nt, Artificial Sequence
  Chemically synthesized
caaccgugggaaaacaaauaagc

SEQ ID NO: 63708 - RNA, 23 nt, Artificial Sequence
  Chemically synthesized
aaccgugggaaaacaaauaagca

SEQ ID NO: 63709 - RNA, 23 nt, Artificial Sequence
  Chemically synthesized
accgugggaaaacaaauaagcaa

SEQ ID NO: 63710 - RNA, 23 nt, Artificial Sequence
  Chemically synthesized
aggaggcaaaagcaaaucacugc

SEQ ID NO: 63711 - RNA, 23 nt, Artificial Sequence
  Chemically synthesized
ggaggcaaaagcaaaucacugca

SEQ ID NO: 63712 - RNA, 23 nt, Artificial Sequence
  Chemically synthesized
gaggcaaaagcaaaucacugcaa

SEQ ID NO: 63713 - RNA, 23 nt, Artificial Sequence
  Chemically synthesized
aggcaaaagcaaaucacugcaau

SEQ ID NO: 63714 - RNA, 23 nt, Artificial Sequence
  Chemically synthesized
ggcaaaagcaaaucacugcaauu

SEQ ID NO: 63715 - RNA, 23 nt, Artificial Sequence
  Chemically synthesized
cugcuuguggcuguggguuucag

SEQ ID NO: 63716 - RNA, 23 nt, Artificial Sequence
  Chemically synthesized
ugcuuguggcuguggguuucagc

SEQ ID NO: 63717 - RNA, 23 nt, Artificial Sequence
  Chemically synthesized
gcuuguggcuguggguuucagca

SEQ ID NO: 63718 - RNA, 23 nt, Artificial Sequence
  Chemically synthesized
cuuguggcuguggguuucagcac

SEQ ID NO: 63719 - RNA, 23 nt, Artificial Sequence
  Chemically synthesized
uuguggcuguggguuucagcacu

SEQ ID NO: 63720 - RNA, 23 nt, Artificial Sequence
  Chemically synthesized
ccucgucuguagcaucaggguac

SEQ ID NO: 63721 - RNA, 23 nt, Artificial Sequence
  Chemically synthesized
cucgucuguagcaucaggguacu

SEQ ID NO: 63722 - RNA, 23 nt, Artificial Sequence
  Chemically synthesized
ucgucuguagcaucaggguacug

SEQ ID NO: 63723 - RNA, 23 nt, Artificial Sequence
  Chemically synthesized
uagcaucaggguacuggauguca

SEQ ID NO: 63724 - RNA, 23 nt, Artificial Sequence
  Chemically synthesized
agcaucaggguacuggaugucag

SEQ ID NO: 63725 - RNA, 23 nt, Artificial Sequence
  Chemically synthesized
gcaucaggguacuggaugucagg

SEQ ID NO: 63726 - RNA, 23 nt, Artificial Sequence
  Chemically synthesized
caucaggguacuggaugucaggu

SEQ ID NO: 63727 - RNA, 23 nt, Artificial Sequence
  Chemically synthesized
aucaggguacuggaugucagguc

SEQ ID NO: 63728 - RNA, 23 nt, Artificial Sequence
  Chemically synthesized
acucaucagacuggugagaauca

SEQ ID NO: 63729 - RNA, 23 nt, Artificial Sequence
  Chemically synthesized
cucaucagacuggugagaaucau

SEQ ID NO: 63730 - RNA, 23 nt, Artificial Sequence
  Chemically synthesized
ucaucagacuggugagaaucauc

SEQ ID NO: 63731 - RNA, 23 nt, Artificial Sequence
  Chemically synthesized
ucaucagagucguucgagucaau

SEQ ID NO: 63732 - RNA, 23 nt, Artificial Sequence
  Chemically synthesized
caucagagucguucgagucaaug

SEQ ID NO: 63733 - RNA, 23 nt, Artificial Sequence
  Chemically synthesized
aucagagucguucgagucaaugg

SEQ ID NO: 63734 - RNA, 23 nt, Artificial Sequence
  Chemically synthesized
acuuccagaaucagccuguuuaa

SEQ ID NO: 63735 - RNA, 23 nt, Artificial Sequence
  Chemically synthesized
ggcugugaaauucauggcugugg

SEQ ID NO: 63736 - RNA, 23 nt, Artificial Sequence
  Chemically synthesized
gcugugaaauucauggcugugga

SEQ ID NO: 63737 - RNA, 23 nt, Artificial Sequence
  Chemically synthesized
cugugaaauucauggcuguggaa

SEQ ID NO: 63738 - RNA, 23 nt, Artificial Sequence
  Chemically synthesized
uucauggcuguggaauucacggc

SEQ ID NO: 63739 - RNA, 23 nt, Artificial Sequence
  Chemically synthesized
guagcaucaggguacuggauguc

SEQ ID NO: 63740 - RNA, 23 nt, Artificial Sequence
  Chemically synthesized
cagguccgugggaaaaucaguga

SEQ ID NO: 63741 - RNA, 23 nt, Artificial Sequence
  Chemically synthesized
agguccgugggaaaaucagugac

SEQ ID NO: 63742 - RNA, 23 nt, Artificial Sequence
  Chemically synthesized
gguccgugggaaaaucagugacc

SEQ ID NO: 63743 - RNA, 23 nt, Artificial Sequence
  Chemically synthesized
guccgugggaaaaucagugacca

SEQ ID NO: 63744 - RNA, 23 nt, Artificial Sequence
  Chemically synthesized
uccgugggaaaaucagugaccag

SEQ ID NO: 63745 - RNA, 23 nt, Artificial Sequence
  Chemically synthesized
ucagagucguucgagucaaugga

SEQ ID NO: 63746 - RNA, 23 nt, Artificial Sequence
  Chemically synthesized
cagagucguucgagucaauggag

SEQ ID NO: 63747 - RNA, 23 nt, Artificial Sequence
  Chemically synthesized
agagucguucgagucaauggagu

SEQ ID NO: 63748 - RNA, 23 nt, Artificial Sequence
  Chemically synthesized
gagucguucgagucaauggaguc

SEQ ID NO: 63749 - RNA, 23 nt, Artificial Sequence
  Chemically synthesized
auuucuauucaugagagaauaac

SEQ ID NO: 63750 - RNA, 23 nt, Artificial Sequence
  Chemically synthesized
uuucuauucaugagagaauaaca

SEQ ID NO: 63751 - RNA, 23 nt, Artificial Sequence
  Chemically synthesized
uucuauucaugagagaauaacaa

SEQ ID NO: 63752 - RNA, 23 nt, Artificial Sequence
  Chemically synthesized
ucuauucaugagagaauaacaaa

SEQ ID NO: 63753 - RNA, 23 nt, Artificial Sequence
  Chemically synthesized
cuauucaugagagaauaacaaau

SEQ ID NO: 63754 - RNA, 23 nt, Artificial Sequence
  Chemically synthesized
ggugaugccuaggaggcaaaagc

SEQ ID NO: 63755 - RNA, 23 nt, Artificial Sequence
  Chemically synthesized
gugaugccuaggaggcaaaagca

SEQ ID NO: 63756 - RNA, 23 nt, Artificial Sequence
  Chemically synthesized
ugaugccuaggaggcaaaagcaa

SEQ ID NO: 63757 - RNA, 23 nt, Artificial Sequence
  Chemically synthesized
gaugccuaggaggcaaaagcaaa

SEQ ID NO: 63758 - RNA, 23 nt, Artificial Sequence
  Chemically synthesized
augccuaggaggcaaaagcaaau

SEQ ID NO: 63759 - RNA, 23 nt, Artificial Sequence
  Chemically synthesized
uuuucuuuugacuaaaugcaaag

SEQ ID NO: 63760 - RNA, 23 nt, Artificial Sequence
  Chemically synthesized
uuucuuuugacuaaaugcaaagu

SEQ ID NO: 63761 - RNA, 23 nt, Artificial Sequence
  Chemically synthesized
ucauggcuguggaauucacggcu

SEQ ID NO: 63762 - RNA, 23 nt, Artificial Sequence
  Chemically synthesized
cauggcuguggaauucacggcug

SEQ ID NO: 63763 - RNA, 23 nt, Artificial Sequence
  Chemically synthesized
auggcuguggaauucacggcuga

SEQ ID NO: 63764 - RNA, 23 nt, Artificial Sequence
  Chemically synthesized
cauaacuguccuucccacggcug

SEQ ID NO: 63765 - RNA, 23 nt, Artificial Sequence
  Chemically synthesized
auaacuguccuucccacggcugu

SEQ ID NO: 63766 - RNA, 23 nt, Artificial Sequence
  Chemically synthesized
acagggaguuuccaugaagccac

SEQ ID NO: 63767 - RNA, 23 nt, Artificial Sequence
  Chemically synthesized
cagggaguuuccaugaagccaca

SEQ ID NO: 63768 - RNA, 23 nt, Artificial Sequence
  Chemically synthesized
agggaguuuccaugaagccacaa

SEQ ID NO: 63769 - RNA, 23 nt, Artificial Sequence
  Chemically synthesized
uuaaaugcugcugcagacauccu

SEQ ID NO: 63770 - RNA, 23 nt, Artificial Sequence
  Chemically synthesized
uaaaugcugcugcagacauccuc

SEQ ID NO: 63771 - RNA, 23 nt, Artificial Sequence
  Chemically synthesized
aaaugcugcugcagacauccucc

SEQ ID NO: 63772 - RNA, 23 nt, Artificial Sequence
  Chemically synthesized
aaugcugcugcagacauccucca

SEQ ID NO: 63773 - RNA, 23 nt, Artificial Sequence
  Chemically synthesized
gcagguccgugggaaaaucagug

SEQ ID NO: 63774 - RNA, 23 nt, Artificial Sequence
  Chemically synthesized
ggcguuuggcugagaaggcugca

SEQ ID NO: 63775 - RNA, 23 nt, Artificial Sequence
  Chemically synthesized
gcguuuggcugagaaggcugcaa

SEQ ID NO: 63776 - RNA, 23 nt, Artificial Sequence
  Chemically synthesized
cguuuggcugagaaggcugcaac

SEQ ID NO: 63777 - RNA, 23 nt, Artificial Sequence
  Chemically synthesized
guuuggcugagaaggcugcaacu

SEQ ID NO: 63778 - RNA, 23 nt, Artificial Sequence
  Chemically synthesized
uuuggcugagaaggcugcaacug

SEQ ID NO: 63779 - RNA, 23 nt, Artificial Sequence
  Chemically synthesized
ccgugggaaaacaaauaagcaau

SEQ ID NO: 63780 - RNA, 23 nt, Artificial Sequence
  Chemically synthesized
cgugggaaaacaaauaagcaauu

SEQ ID NO: 63781 - RNA, 23 nt, Artificial Sequence
  Chemically synthesized
aauucucaugguagugaguuuuc

SEQ ID NO: 63782 - RNA, 23 nt, Artificial Sequence
  Chemically synthesized
uaucuucauggcugugaaauuca

SEQ ID NO: 63783 - RNA, 23 nt, Artificial Sequence
  Chemically synthesized
aucuucauggcugugaaauucau

SEQ ID NO: 63784 - RNA, 23 nt, Artificial Sequence
  Chemically synthesized
ucuucauggcugugaaauucaug

SEQ ID NO: 63785 - RNA, 23 nt, Artificial Sequence
  Chemically synthesized
auuuugaccucaguccauaaacc

SEQ ID NO: 63786 - RNA, 23 nt, Artificial Sequence
  Chemically synthesized
uuuugaccucaguccauaaacca

SEQ ID NO: 63787 - RNA, 23 nt, Artificial Sequence
  Chemically synthesized
uuugaccucaguccauaaaccac

SEQ ID NO: 63788 - RNA, 23 nt, Artificial Sequence
  Chemically synthesized
uugaccucaguccauaaaccaca

SEQ ID NO: 63789 - RNA, 23 nt, Artificial Sequence
  Chemically synthesized
acugagaaagaagcauuucaugu

SEQ ID NO: 63790 - RNA, 23 nt, Artificial Sequence
  Chemically synthesized
cugagaaagaagcauuucauguu

SEQ ID NO: 63791 - RNA, 23 nt, Artificial Sequence
  Chemically synthesized
ugugaaauucauggcuguggaau

SEQ ID NO: 63792 - RNA, 23 nt, Artificial Sequence
  Chemically synthesized
gugaaauucauggcuguggaauu

SEQ ID NO: 63793 - RNA, 23 nt, Artificial Sequence
  Chemically synthesized
aucuggacugcuuguggcugugg

SEQ ID NO: 63794 - RNA, 23 nt, Artificial Sequence
  Chemically synthesized
ucugcgaaacuucuuagauuuug

SEQ ID NO: 63795 - RNA, 23 nt, Artificial Sequence
  Chemically synthesized
cugcgaaacuucuuagauuuuga

SEQ ID NO: 63796 - RNA, 23 nt, Artificial Sequence
  Chemically synthesized
ugcgaaacuucuuagauuuugac

SEQ ID NO: 63797 - RNA, 23 nt, Artificial Sequence
  Chemically synthesized
cugguauggcacaggugaugccu

SEQ ID NO: 63798 - RNA, 23 nt, Artificial Sequence
  Chemically synthesized
ugguauggcacaggugaugccua

SEQ ID NO: 63799 - RNA, 23 nt, Artificial Sequence
  Chemically synthesized
gguauggcacaggugaugccuag

SEQ ID NO: 63800 - RNA, 23 nt, Artificial Sequence
  Chemically synthesized
guauggcacaggugaugccuagg

SEQ ID NO: 63801 - RNA, 23 nt, Artificial Sequence
  Chemically synthesized
uauggcacaggugaugccuagga

SEQ ID NO: 63802 - RNA, 23 nt, Artificial Sequence
  Chemically synthesized
ugaccucagaagaugcacuaucu

SEQ ID NO: 63803 - RNA, 23 nt, Artificial Sequence
  Chemically synthesized
gaccucagaagaugcacuaucua

SEQ ID NO: 63804 - RNA, 23 nt, Artificial Sequence
  Chemically synthesized
accucagaagaugcacuaucuaa

SEQ ID NO: 63805 - RNA, 23 nt, Artificial Sequence
  Chemically synthesized
ccucagaagaugcacuaucuaau

SEQ ID NO: 63806 - RNA, 23 nt, Artificial Sequence
  Chemically synthesized
cucagaagaugcacuaucuaauu

SEQ ID NO: 63807 - RNA, 23 nt, Artificial Sequence
  Chemically synthesized
agccuguuuaacugguauggcac

SEQ ID NO: 63808 - RNA, 23 nt, Artificial Sequence
  Chemically synthesized
gccuguuuaacugguauggcaca

SEQ ID NO: 63809 - RNA, 23 nt, Artificial Sequence
  Chemically synthesized
ccuguuuaacugguauggcacag

SEQ ID NO: 63810 - RNA, 23 nt, Artificial Sequence
  Chemically synthesized
cuguuuaacugguauggcacagg

SEQ ID NO: 63811 - RNA, 23 nt, Artificial Sequence
  Chemically synthesized
uguuuaacugguauggcacaggu

SEQ ID NO: 63812 - RNA, 23 nt, Artificial Sequence
  Chemically synthesized
gguuauguuuuauuaauugcugg

SEQ ID NO: 63813 - RNA, 23 nt, Artificial Sequence
  Chemically synthesized
gaugucaggucugcgaaacuucu

SEQ ID NO: 63814 - RNA, 23 nt, Artificial Sequence
  Chemically synthesized
gaaaacaaauaagcaauugacac

SEQ ID NO: 63815 - RNA, 23 nt, Artificial Sequence
  Chemically synthesized
uugacaccaccaaauucuuauua

SEQ ID NO: 63816 - RNA, 23 nt, Artificial Sequence
  Chemically synthesized
ugggaaaacaaauaagcaauuga

SEQ ID NO: 63817 - RNA, 23 nt, Artificial Sequence
  Chemically synthesized
gugggaaaacaaauaagcaauug

SEQ ID NO: 63818 - RNA, 23 nt, Artificial Sequence
  Chemically synthesized
gccacaaacuaaacuaauuauca

SEQ ID NO: 63819 - RNA, 23 nt, Artificial Sequence
  Chemically synthesized
ucaguccauaaaccacacuauca

SEQ ID NO: 63820 - RNA, 23 nt, Artificial Sequence
  Chemically synthesized
uccaugaagccacaaacuaaacu

SEQ ID NO: 63821 - RNA, 23 nt, Artificial Sequence
  Chemically synthesized
aacccugaagcuuuuaguuuaca

SEQ ID NO: 63822 - RNA, 23 nt, Artificial Sequence
  Chemically synthesized
ucucuuucauuuugcuauaaagc

SEQ ID NO: 63823 - RNA, 23 nt, Artificial Sequence
  Chemically synthesized
cucuuucauuuugcuauaaagca

SEQ ID NO: 63824 - RNA, 23 nt, Artificial Sequence
  Chemically synthesized
aacugguauggcacaggugaugc

SEQ ID NO: 63825 - RNA, 23 nt, Artificial Sequence
  Chemically synthesized
ucaugagaaauacgaaauuucag

SEQ ID NO: 63826 - RNA, 23 nt, Artificial Sequence
  Chemically synthesized
cuucuauagaaugaacauagaca

SEQ ID NO: 63827 - RNA, 23 nt, Artificial Sequence
  Chemically synthesized
cacugcaauucucaugguaguga

SEQ ID NO: 63828 - RNA, 23 nt, Artificial Sequence
  Chemically synthesized
gauggccuuguaugcaccauuca

SEQ ID NO: 63829 - RNA, 23 nt, Artificial Sequence
  Chemically synthesized
auggccuuguaugcaccauucaa

SEQ ID NO: 63830 - RNA, 23 nt, Artificial Sequence
  Chemically synthesized
ucuucuauagaaugaacauagac

SEQ ID NO: 63831 - RNA, 23 nt, Artificial Sequence
  Chemically synthesized
gugagaaauuguauuuuuucucc

SEQ ID NO: 63832 - RNA, 23 nt, Artificial Sequence
  Chemically synthesized
uggguaaaaguauuuuguuugcu

SEQ ID NO: 63833 - RNA, 23 nt, Artificial Sequence
  Chemically synthesized
cuaucuaauucaugagaaauacg

SEQ ID NO: 63834 - RNA, 23 nt, Artificial Sequence
  Chemically synthesized
cacggcugacuuuggaaaguucc

SEQ ID NO: 63835 - RNA, 23 nt, Artificial Sequence
  Chemically synthesized
acggcugacuuuggaaaguuccu

SEQ ID NO: 63836 - RNA, 23 nt, Artificial Sequence
  Chemically synthesized
ucacggcugacuuuggaaaguuc

SEQ ID NO: 63837 - RNA, 23 nt, Artificial Sequence
  Chemically synthesized
ccacaguguuugagaacuaugug

SEQ ID NO: 63838 - RNA, 23 nt, Artificial Sequence
  Chemically synthesized
cccacaguguuugagaacuaugu

SEQ ID NO: 63839 - RNA, 23 nt, Artificial Sequence
  Chemically synthesized
gcccacaguguuugagaacuaug

SEQ ID NO: 63840 - RNA, 23 nt, Artificial Sequence
  Chemically synthesized
ugcccacaguguuugagaacuau

SEQ ID NO: 63841 - RNA, 23 nt, Artificial Sequence
  Chemically synthesized
gugcccacaguguuugagaacua

SEQ ID NO: 63842 - RNA, 23 nt, Artificial Sequence
  Chemically synthesized
ggccuuuuucauuuaucuauaau

SEQ ID NO: 63843 - RNA, 23 nt, Artificial Sequence
  Chemically synthesized
uggccuuuuucauuuaucuauaa

SEQ ID NO: 63844 - RNA, 23 nt, Artificial Sequence
  Chemically synthesized
cuggccuuuuucauuuaucuaua

SEQ ID NO: 63845 - RNA, 23 nt, Artificial Sequence
  Chemically synthesized
acuggccuuuuucauuuaucuau

SEQ ID NO: 63846 - RNA, 23 nt, Artificial Sequence
  Chemically synthesized
uacuggccuuuuucauuuaucua

SEQ ID NO: 63847 - RNA, 23 nt, Artificial Sequence
  Chemically synthesized
gggcaguuuuuugaaaaugggcu

SEQ ID NO: 63848 - RNA, 23 nt, Artificial Sequence
  Chemically synthesized
ugggcaguuuuuugaaaaugggc

SEQ ID NO: 63849 - RNA, 23 nt, Artificial Sequence
  Chemically synthesized
gugggcaguuuuuugaaaauggg

SEQ ID NO: 63850 - RNA, 23 nt, Artificial Sequence
  Chemically synthesized
ggugggcaguuuuuugaaaaugg

SEQ ID NO: 63851 - RNA, 23 nt, Artificial Sequence
  Chemically synthesized
gggugggcaguuuuuugaaaaug

SEQ ID NO: 63852 - RNA, 23 nt, Artificial Sequence
  Chemically synthesized
ccuuuugacacugcucuaacagc

SEQ ID NO: 63853 - RNA, 23 nt, Artificial Sequence
  Chemically synthesized
uccuuuugacacugcucuaacag

SEQ ID NO: 63854 - RNA, 23 nt, Artificial Sequence
  Chemically synthesized
guccuuuugacacugcucuaaca

SEQ ID NO: 63855 - RNA, 23 nt, Artificial Sequence
  Chemically synthesized
gguccuuuugacacugcucuaac

SEQ ID NO: 63856 - RNA, 23 nt, Artificial Sequence
  Chemically synthesized
ggguccuuuugacacugcucuaa

SEQ ID NO: 63857 - RNA, 23 nt, Artificial Sequence
  Chemically synthesized
uuacuggccuuuuucauuuaucu

SEQ ID NO: 63858 - RNA, 23 nt, Artificial Sequence
  Chemically synthesized
auuacuggccuuuuucauuuauc

SEQ ID NO: 63859 - RNA, 23 nt, Artificial Sequence
  Chemically synthesized
gauuacuggccuuuuucauuuau

SEQ ID NO: 63860 - RNA, 23 nt, Artificial Sequence
  Chemically synthesized
ggggugggcaguuuuuugaaaau

SEQ ID NO: 63861 - RNA, 23 nt, Artificial Sequence
  Chemically synthesized
ccaacuaugauuauuaacgaugu

SEQ ID NO: 63862 - RNA, 23 nt, Artificial Sequence
  Chemically synthesized
gccaacuaugauuauuaacgaug

SEQ ID NO: 63863 - RNA, 23 nt, Artificial Sequence
  Chemically synthesized
agccaacuaugauuauuaacgau

SEQ ID NO: 63864 - RNA, 23 nt, Artificial Sequence
  Chemically synthesized
aagccaacuaugauuauuaacga

SEQ ID NO: 63865 - RNA, 23 nt, Artificial Sequence
  Chemically synthesized
gaagccaacuaugauuauuaacg

SEQ ID NO: 63866 - RNA, 23 nt, Artificial Sequence
  Chemically synthesized
ugagagagguuuuugaaauggcu

SEQ ID NO: 63867 - RNA, 23 nt, Artificial Sequence
  Chemically synthesized
gugagagagguuuuugaaauggc

SEQ ID NO: 63868 - RNA, 23 nt, Artificial Sequence
  Chemically synthesized
agugagagagguuuuugaaaugg

SEQ ID NO: 63869 - RNA, 23 nt, Artificial Sequence
  Chemically synthesized
gagugagagagguuuuugaaaug

SEQ ID NO: 63870 - RNA, 23 nt, Artificial Sequence
  Chemically synthesized
ggagugagagagguuuuugaaau

SEQ ID NO: 63871 - RNA, 23 nt, Artificial Sequence
  Chemically synthesized
ggcuaaguaaauaggaauugguu

SEQ ID NO: 63872 - RNA, 23 nt, Artificial Sequence
  Chemically synthesized
gggcuaaguaaauaggaauuggu

SEQ ID NO: 63873 - RNA, 23 nt, Artificial Sequence
  Chemically synthesized
ugggcuaaguaaauaggaauugg

SEQ ID NO: 63874 - RNA, 23 nt, Artificial Sequence
  Chemically synthesized
cugggcuaaguaaauaggaauug

SEQ ID NO: 63875 - RNA, 23 nt, Artificial Sequence
  Chemically synthesized
gcugggcuaaguaaauaggaauu

SEQ ID NO: 63876 - RNA, 23 nt, Artificial Sequence
  Chemically synthesized
ggaaagacaugcuugcucauagu

SEQ ID NO: 63877 - RNA, 23 nt, Artificial Sequence
  Chemically synthesized
uggaaagacaugcuugcucauag

SEQ ID NO: 63878 - RNA, 23 nt, Artificial Sequence
  Chemically synthesized
guggaaagacaugcuugcucaua

SEQ ID NO: 63879 - RNA, 23 nt, Artificial Sequence
  Chemically synthesized
uguggaaagacaugcuugcucau

SEQ ID NO: 63880 - RNA, 23 nt, Artificial Sequence
  Chemically synthesized
cuguggaaagacaugcuugcuca

SEQ ID NO: 63881 - RNA, 23 nt, Artificial Sequence
  Chemically synthesized
ccuguggaaagacaugcuugcuc

SEQ ID NO: 63882 - RNA, 23 nt, Artificial Sequence
  Chemically synthesized
gccuguggaaagacaugcuugcu

SEQ ID NO: 63883 - RNA, 23 nt, Artificial Sequence
  Chemically synthesized
agccuguggaaagacaugcuugc

SEQ ID NO: 63884 - RNA, 23 nt, Artificial Sequence
  Chemically synthesized
gagccuguggaaagacaugcuug

SEQ ID NO: 63885 - RNA, 23 nt, Artificial Sequence
  Chemically synthesized
ggagccuguggaaagacaugcuu

SEQ ID NO: 63886 - RNA, 23 nt, Artificial Sequence
  Chemically synthesized
ugauuauuaacgauguccaaccc

SEQ ID NO: 63887 - RNA, 23 nt, Artificial Sequence
  Chemically synthesized
augauuauuaacgauguccaacc

SEQ ID NO: 63888 - RNA, 23 nt, Artificial Sequence
  Chemically synthesized
uaugauuauuaacgauguccaac

SEQ ID NO: 63889 - RNA, 23 nt, Artificial Sequence
  Chemically synthesized
cuaugauuauuaacgauguccaa

SEQ ID NO: 63890 - RNA, 23 nt, Artificial Sequence
  Chemically synthesized
acuaugauuauuaacgaugucca

SEQ ID NO: 63891 - RNA, 23 nt, Artificial Sequence
  Chemically synthesized
agaagccaacuaugauuauuaac

SEQ ID NO: 63892 - RNA, 23 nt, Artificial Sequence
  Chemically synthesized
uagaagccaacuaugauuauuaa

SEQ ID NO: 63893 - RNA, 23 nt, Artificial Sequence
  Chemically synthesized
uuagaagccaacuaugauuauua

SEQ ID NO: 63894 - RNA, 23 nt, Artificial Sequence
  Chemically synthesized
uuuagaagccaacuaugauuauu

SEQ ID NO: 63895 - RNA, 23 nt, Artificial Sequence
  Chemically synthesized
cuaauucacagugcucuuuucuc

SEQ ID NO: 63896 - RNA, 23 nt, Artificial Sequence
  Chemically synthesized
ucuaauucacagugcucuuuucu

SEQ ID NO: 63897 - RNA, 23 nt, Artificial Sequence
  Chemically synthesized
cucuaauucacagugcucuuuuc

SEQ ID NO: 63898 - RNA, 23 nt, Artificial Sequence
  Chemically synthesized
gcucuaauucacagugcucuuuu

SEQ ID NO: 63899 - RNA, 23 nt, Artificial Sequence
  Chemically synthesized
ggcucuaauucacagugcucuuu

SEQ ID NO: 63900 - RNA, 23 nt, Artificial Sequence
  Chemically synthesized
ccaaguucaugcagcuguggcag

SEQ ID NO: 63901 - RNA, 23 nt, Artificial Sequence
  Chemically synthesized
cccaaguucaugcagcuguggca

SEQ ID NO: 63902 - RNA, 23 nt, Artificial Sequence
  Chemically synthesized
gcccaaguucaugcagcuguggc

SEQ ID NO: 63903 - RNA, 23 nt, Artificial Sequence
  Chemically synthesized
agcccaaguucaugcagcugugg

SEQ ID NO: 63904 - RNA, 23 nt, Artificial Sequence
  Chemically synthesized
aagcccaaguucaugcagcugug

SEQ ID NO: 63905 - RNA, 23 nt, Artificial Sequence
  Chemically synthesized
gcaguuuuuugaaaaugggcuca

SEQ ID NO: 63906 - RNA, 23 nt, Artificial Sequence
  Chemically synthesized
ggcaguuuuuugaaaaugggcuc

SEQ ID NO: 63907 - RNA, 23 nt, Artificial Sequence
  Chemically synthesized
uuaggcuguaacuacuuuauaac

SEQ ID NO: 63908 - RNA, 23 nt, Artificial Sequence
  Chemically synthesized
ugauuacuggccuuuuucauuua

SEQ ID NO: 63909 - RNA, 23 nt, Artificial Sequence
  Chemically synthesized
gauggagugagagagguuuuuga

SEQ ID NO: 63910 - RNA, 23 nt, Artificial Sequence
  Chemically synthesized
agauggagugagagagguuuuug

SEQ ID NO: 63911 - RNA, 23 nt, Artificial Sequence
  Chemically synthesized
aagauggagugagagagguuuuu

SEQ ID NO: 63912 - RNA, 23 nt, Artificial Sequence
  Chemically synthesized
uccggaagaaacuggugauuguu

SEQ ID NO: 63913 - RNA, 23 nt, Artificial Sequence
  Chemically synthesized
auccggaagaaacuggugauugu

SEQ ID NO: 63914 - RNA, 23 nt, Artificial Sequence
  Chemically synthesized
cauccggaagaaacuggugauug

SEQ ID NO: 63915 - RNA, 23 nt, Artificial Sequence
  Chemically synthesized
ccauccggaagaaacuggugauu

SEQ ID NO: 63916 - RNA, 23 nt, Artificial Sequence
  Chemically synthesized
gugcucuuuucuccucacuguau

SEQ ID NO: 63917 - RNA, 23 nt, Artificial Sequence
  Chemically synthesized
agugcucuuuucuccucacugua

SEQ ID NO: 63918 - RNA, 23 nt, Artificial Sequence
  Chemically synthesized
cagugcucuuuucuccucacugu

SEQ ID NO: 63919 - RNA, 23 nt, Artificial Sequence
  Chemically synthesized
acagugcucuuuucuccucacug

SEQ ID NO: 63920 - RNA, 23 nt, Artificial Sequence
  Chemically synthesized
cacagugcucuuuucuccucacu

SEQ ID NO: 63921 - RNA, 23 nt, Artificial Sequence
  Chemically synthesized
agcugggcuaaguaaauaggaau

SEQ ID NO: 63922 - RNA, 23 nt, Artificial Sequence
  Chemically synthesized
uggggugggcaguuuuuugaaaa

SEQ ID NO: 63923 - RNA, 23 nt, Artificial Sequence
  Chemically synthesized
ggcgcuaauucaaggaauuucuu

SEQ ID NO: 63924 - RNA, 23 nt, Artificial Sequence
  Chemically synthesized
aggcgcuaauucaaggaauuucu

SEQ ID NO: 63925 - RNA, 23 nt, Artificial Sequence
  Chemically synthesized
caggcgcuaauucaaggaauuuc

SEQ ID NO: 63926 - RNA, 23 nt, Artificial Sequence
  Chemically synthesized
ccaggcgcuaauucaaggaauuu

SEQ ID NO: 63927 - RNA, 23 nt, Artificial Sequence
  Chemically synthesized
accaggcgcuaauucaaggaauu

SEQ ID NO: 63928 - RNA, 23 nt, Artificial Sequence
  Chemically synthesized
augauuacuggccuuuuucauuu

SEQ ID NO: 63929 - RNA, 23 nt, Artificial Sequence
  Chemically synthesized
ggugccuugucuugugaaaccuu

SEQ ID NO: 63930 - RNA, 23 nt, Artificial Sequence
  Chemically synthesized
gggugccuugucuugugaaaccu

SEQ ID NO: 63931 - RNA, 23 nt, Artificial Sequence
  Chemically synthesized
ugggugccuugucuugugaaacc

SEQ ID NO: 63932 - RNA, 23 nt, Artificial Sequence
  Chemically synthesized
cugggugccuugucuugugaaac

SEQ ID NO: 63933 - RNA, 23 nt, Artificial Sequence
  Chemically synthesized
ucugggugccuugucuugugaaa

SEQ ID NO: 63934 - RNA, 23 nt, Artificial Sequence
  Chemically synthesized
aaagauggagugagagagguuuu

SEQ ID NO: 63935 - RNA, 23 nt, Artificial Sequence
  Chemically synthesized
caaagauggagugagagagguuu

SEQ ID NO: 63936 - RNA, 23 nt, Artificial Sequence
  Chemically synthesized
ccaaagauggagugagagagguu

SEQ ID NO: 63937 - RNA, 23 nt, Artificial Sequence
  Chemically synthesized
ggaaugaugagcacacaaggcgg

SEQ ID NO: 63938 - RNA, 23 nt, Artificial Sequence
  Chemically synthesized
cggaaugaugagcacacaaggcg

SEQ ID NO: 63939 - RNA, 23 nt, Artificial Sequence
  Chemically synthesized
ucggaaugaugagcacacaaggc

SEQ ID NO: 63940 - RNA, 23 nt, Artificial Sequence
  Chemically synthesized
uucggaaugaugagcacacaagg

SEQ ID NO: 63941 - RNA, 23 nt, Artificial Sequence
  Chemically synthesized
cuucggaaugaugagcacacaag

SEQ ID NO: 63942 - RNA, 23 nt, Artificial Sequence
  Chemically synthesized
accccagaagucaagcauuucug

SEQ ID NO: 63943 - RNA, 23 nt, Artificial Sequence
  Chemically synthesized
gaccccagaagucaagcauuucu

SEQ ID NO: 63944 - RNA, 23 nt, Artificial Sequence
  Chemically synthesized
ggaagauuaugaucgccugaggc

SEQ ID NO: 63945 - RNA, 23 nt, Artificial Sequence
  Chemically synthesized
aggaagauuaugaucgccugagg

SEQ ID NO: 63946 - RNA, 23 nt, Artificial Sequence
  Chemically synthesized
caggaagauuaugaucgccugag

SEQ ID NO: 63947 - RNA, 23 nt, Artificial Sequence
  Chemically synthesized
gcaggaagauuaugaucgccuga

SEQ ID NO: 63948 - RNA, 23 nt, Artificial Sequence
  Chemically synthesized
ggcaggaagauuaugaucgccug

SEQ ID NO: 63949 - RNA, 23 nt, Artificial Sequence
  Chemically synthesized
ucacagugcucuuuucuccucac

SEQ ID NO: 63950 - RNA, 23 nt, Artificial Sequence
  Chemically synthesized
uucacagugcucuuuucuccuca

SEQ ID NO: 63951 - RNA, 23 nt, Artificial Sequence
  Chemically synthesized
auucacagugcucuuuucuccuc

SEQ ID NO: 63952 - RNA, 23 nt, Artificial Sequence
  Chemically synthesized
gcaucuggcucuaauucacagug

SEQ ID NO: 63953 - RNA, 23 nt, Artificial Sequence
  Chemically synthesized
agcaucuggcucuaauucacagu

SEQ ID NO: 63954 - RNA, 23 nt, Artificial Sequence
  Chemically synthesized
aagcaucuggcucuaauucacag

SEQ ID NO: 63955 - RNA, 23 nt, Artificial Sequence
  Chemically synthesized
uaagcaucuggcucuaauucaca

SEQ ID NO: 63956 - RNA, 23 nt, Artificial Sequence
  Chemically synthesized
uuaagcaucuggcucuaauucac

SEQ ID NO: 63957 - RNA, 23 nt, Artificial Sequence
  Chemically synthesized
acacuuuggaagauggcauaacc

SEQ ID NO: 63958 - RNA, 23 nt, Artificial Sequence
  Chemically synthesized
gacacuuuggaagauggcauaac

SEQ ID NO: 63959 - RNA, 23 nt, Artificial Sequence
  Chemically synthesized
agacacuuuggaagauggcauaa

SEQ ID NO: 63960 - RNA, 23 nt, Artificial Sequence
  Chemically synthesized
uagacacuuuggaagauggcaua

SEQ ID NO: 63961 - RNA, 23 nt, Artificial Sequence
  Chemically synthesized
uuagacacuuuggaagauggcau

SEQ ID NO: 63962 - RNA, 23 nt, Artificial Sequence
  Chemically synthesized
gcaauuagacacuuuggaagaug

SEQ ID NO: 63963 - RNA, 23 nt, Artificial Sequence
  Chemically synthesized
ggcaauuagacacuuuggaagau

SEQ ID NO: 63964 - RNA, 23 nt, Artificial Sequence
  Chemically synthesized
aggcaauuagacacuuuggaaga

SEQ ID NO: 63965 - RNA, 23 nt, Artificial Sequence
  Chemically synthesized
gaggcaauuagacacuuuggaag

SEQ ID NO: 63966 - RNA, 23 nt, Artificial Sequence
  Chemically synthesized
ugaggcaauuagacacuuuggaa

SEQ ID NO: 63967 - RNA, 23 nt, Artificial Sequence
  Chemically synthesized
cugaggcaauuagacacuuugga

SEQ ID NO: 63968 - RNA, 23 nt, Artificial Sequence
  Chemically synthesized
ggauuuccuaauacugucauccu

SEQ ID NO: 63969 - RNA, 23 nt, Artificial Sequence
  Chemically synthesized
uggauuuccuaauacugucaucc

SEQ ID NO: 63970 - RNA, 23 nt, Artificial Sequence
  Chemically synthesized
uuggauuuccuaauacugucauc

SEQ ID NO: 63971 - RNA, 23 nt, Artificial Sequence
  Chemically synthesized
auuggauuuccuaauacugucau

SEQ ID NO: 63972 - RNA, 23 nt, Artificial Sequence
  Chemically synthesized
aauuggauuuccuaauacuguca

SEQ ID NO: 63973 - RNA, 23 nt, Artificial Sequence
  Chemically synthesized
aaagcccaaguucaugcagcugu

SEQ ID NO: 63974 - RNA, 23 nt, Artificial Sequence
  Chemically synthesized
ccagaaaagcccaaguucaugca

SEQ ID NO: 63975 - RNA, 23 nt, Artificial Sequence
  Chemically synthesized
accagaaaagcccaaguucaugc

SEQ ID NO: 63976 - RNA, 23 nt, Artificial Sequence
  Chemically synthesized
aaccagaaaagcccaaguucaug

SEQ ID NO: 63977 - RNA, 23 nt, Artificial Sequence
  Chemically synthesized
caaccagaaaagcccaaguucau

SEQ ID NO: 63978 - RNA, 23 nt, Artificial Sequence
  Chemically synthesized
ucaaccagaaaagcccaaguuca

SEQ ID NO: 63979 - RNA, 23 nt, Artificial Sequence
  Chemically synthesized
cuggggugggcaguuuuuugaaa

SEQ ID NO: 63980 - RNA, 23 nt, Artificial Sequence
  Chemically synthesized
aggguccuuuugacacugcucua

SEQ ID NO: 63981 - RNA, 23 nt, Artificial Sequence
  Chemically synthesized
auuuagaagccaacuaugauuau

SEQ ID NO: 63982 - RNA, 23 nt, Artificial Sequence
  Chemically synthesized
ggaagaaaaaaucugggugccuu

SEQ ID NO: 63983 - RNA, 23 nt, Artificial Sequence
  Chemically synthesized
gggaagaaaaaaucugggugccu

SEQ ID NO: 63984 - RNA, 23 nt, Artificial Sequence
  Chemically synthesized
ugggaagaaaaaaucugggugcc

SEQ ID NO: 63985 - RNA, 23 nt, Artificial Sequence
  Chemically synthesized
gugggaagaaaaaaucugggugc

SEQ ID NO: 63986 - RNA, 23 nt, Artificial Sequence
  Chemically synthesized
cgugggaagaaaaaaucugggug

SEQ ID NO: 63987 - RNA, 23 nt, Artificial Sequence
  Chemically synthesized
ucuucggaaugaugagcacacaa

SEQ ID NO: 63988 - RNA, 23 nt, Artificial Sequence
  Chemically synthesized
ugagaacuauguggcagauaucg

SEQ ID NO: 63989 - RNA, 23 nt, Artificial Sequence
  Chemically synthesized
uugagaacuauguggcagauauc

SEQ ID NO: 63990 - RNA, 23 nt, Artificial Sequence
  Chemically synthesized
uuugagaacuauguggcagauau

SEQ ID NO: 63991 - RNA, 23 nt, Artificial Sequence
  Chemically synthesized
guuugagaacuauguggcagaua

SEQ ID NO: 63992 - RNA, 23 nt, Artificial Sequence
  Chemically synthesized
uguuugagaacuauguggcagau

SEQ ID NO: 63993 - RNA, 23 nt, Artificial Sequence
  Chemically synthesized
uuucuguaccaguuaauuuuucc

SEQ ID NO: 63994 - RNA, 23 nt, Artificial Sequence
  Chemically synthesized
uuuucuguaccaguuaauuuuuc

SEQ ID NO: 63995 - RNA, 23 nt, Artificial Sequence
  Chemically synthesized
ggcacucagucucucuucucucc

SEQ ID NO: 63996 - RNA, 23 nt, Artificial Sequence
  Chemically synthesized
uggcacucagucucucuucucuc

SEQ ID NO: 63997 - RNA, 23 nt, Artificial Sequence
  Chemically synthesized
guggcacucagucucucuucucu

SEQ ID NO: 63998 - RNA, 23 nt, Artificial Sequence
  Chemically synthesized
gguggcacucagucucucuucuc

SEQ ID NO: 63999 - RNA, 23 nt, Artificial Sequence
  Chemically synthesized
ggguggcacucagucucucuucu

SEQ ID NO: 64000 - RNA, 23 nt, Artificial Sequence
  Chemically synthesized
cacuuuggaagauggcauaaccu

SEQ ID NO: 64001 - RNA, 23 nt, Artificial Sequence
  Chemically synthesized
ccugaggcaauuagacacuuugg

SEQ ID NO: 64002 - RNA, 23 nt, Artificial Sequence
  Chemically synthesized
gccugaggcaauuagacacuuug

SEQ ID NO: 64003 - RNA, 23 nt, Artificial Sequence
  Chemically synthesized
cgccugaggcaauuagacacuuu

SEQ ID NO: 64004 - RNA, 23 nt, Artificial Sequence
  Chemically synthesized
ugauaaaagauggccauauuacc

SEQ ID NO: 64005 - RNA, 23 nt, Artificial Sequence
  Chemically synthesized
cugauaaaagauggccauauuac

SEQ ID NO: 64006 - RNA, 23 nt, Artificial Sequence
  Chemically synthesized
ucugauaaaagauggccauauua

SEQ ID NO: 64007 - RNA, 23 nt, Artificial Sequence
  Chemically synthesized
uucugauaaaagauggccauauu

SEQ ID NO: 64008 - RNA, 23 nt, Artificial Sequence
  Chemically synthesized
uuucugauaaaagauggccauau

SEQ ID NO: 64009 - RNA, 23 nt, Artificial Sequence
  Chemically synthesized
gggcuuuacuccguaacagauuu

SEQ ID NO: 64010 - RNA, 23 nt, Artificial Sequence
  Chemically synthesized
agggcuuuacuccguaacagauu

SEQ ID NO: 64011 - RNA, 23 nt, Artificial Sequence
  Chemically synthesized
cagggcuuuacuccguaacagau

SEQ ID NO: 64012 - RNA, 23 nt, Artificial Sequence
  Chemically synthesized
ucagggcuuuacuccguaacaga

SEQ ID NO: 64013 - RNA, 23 nt, Artificial Sequence
  Chemically synthesized
uucagggcuuuacuccguaacag

SEQ ID NO: 64014 - RNA, 23 nt, Artificial Sequence
  Chemically synthesized
acgugggaagaaaaaaucugggu

SEQ ID NO: 64015 - RNA, 23 nt, Artificial Sequence
  Chemically synthesized
agacgugggaagaaaaaaucugg

SEQ ID NO: 64016 - RNA, 23 nt, Artificial Sequence
  Chemically synthesized
uagacgugggaagaaaaaaucug

SEQ ID NO: 64017 - RNA, 23 nt, Artificial Sequence
  Chemically synthesized
cuagacgugggaagaaaaaaucu

SEQ ID NO: 64018 - RNA, 23 nt, Artificial Sequence
  Chemically synthesized
gcuagacgugggaagaaaaaauc

SEQ ID NO: 64019 - RNA, 23 nt, Artificial Sequence
  Chemically synthesized
agcuagacgugggaagaaaaaau

SEQ ID NO: 64020 - RNA, 23 nt, Artificial Sequence
  Chemically synthesized
gagagagguuuuugaaauggcua

SEQ ID NO: 64021 - RNA, 23 nt, Artificial Sequence
  Chemically synthesized
cgacagcccugauaguuuagaaa

SEQ ID NO: 64022 - RNA, 23 nt, Artificial Sequence
  Chemically synthesized
ucgacagcccugauaguuuagaa

SEQ ID NO: 64023 - RNA, 23 nt, Artificial Sequence
  Chemically synthesized
aucgacagcccugauaguuuaga

SEQ ID NO: 64024 - RNA, 23 nt, Artificial Sequence
  Chemically synthesized
caucgacagcccugauaguuuag

SEQ ID NO: 64025 - RNA, 23 nt, Artificial Sequence
  Chemically synthesized
ccaucgacagcccugauaguuua

SEQ ID NO: 64026 - RNA, 23 nt, Artificial Sequence
  Chemically synthesized
agaacuauguggcagauaucgag

SEQ ID NO: 64027 - RNA, 23 nt, Artificial Sequence
  Chemically synthesized
gagaacuauguggcagauaucga

SEQ ID NO: 64028 - RNA, 23 nt, Artificial Sequence
  Chemically synthesized
caguguuugagaacuauguggca

SEQ ID NO: 64029 - RNA, 23 nt, Artificial Sequence
  Chemically synthesized
acaguguuugagaacuauguggc

SEQ ID NO: 64030 - RNA, 23 nt, Artificial Sequence
  Chemically synthesized
cacaguguuugagaacuaugugg

SEQ ID NO: 64031 - RNA, 23 nt, Artificial Sequence
  Chemically synthesized
gaauaaaggcaguuuucuaaaaa

SEQ ID NO: 64032 - RNA, 23 nt, Artificial Sequence
  Chemically synthesized
agaauaaaggcaguuuucuaaaa

SEQ ID NO: 64033 - RNA, 23 nt, Artificial Sequence
  Chemically synthesized
uagaauaaaggcaguuuucuaaa

SEQ ID NO: 64034 - RNA, 23 nt, Artificial Sequence
  Chemically synthesized
guaaauaggaauugguuucacgc

SEQ ID NO: 64035 - RNA, 23 nt, Artificial Sequence
  Chemically synthesized
aguaaauaggaauugguuucacg

SEQ ID NO: 64036 - RNA, 23 nt, Artificial Sequence
  Chemically synthesized
aaguaaauaggaauugguuucac

SEQ ID NO: 64037 - RNA, 23 nt, Artificial Sequence
  Chemically synthesized
uaaguaaauaggaauugguuuca

SEQ ID NO: 64038 - RNA, 23 nt, Artificial Sequence
  Chemically synthesized
cuaaguaaauaggaauugguuuc

SEQ ID NO: 64039 - RNA, 23 nt, Artificial Sequence
  Chemically synthesized
cagaaaagcccaaguucaugcag

SEQ ID NO: 64040 - RNA, 23 nt, Artificial Sequence
  Chemically synthesized
ggaauuucuuaacuucuugcuuc

SEQ ID NO: 64041 - RNA, 23 nt, Artificial Sequence
  Chemically synthesized
aggaauuucuuaacuucuugcuu

SEQ ID NO: 64042 - RNA, 23 nt, Artificial Sequence
  Chemically synthesized
aaggaauuucuuaacuucuugcu

SEQ ID NO: 64043 - RNA, 23 nt, Artificial Sequence
  Chemically synthesized
caaggaauuucuuaacuucuugc

SEQ ID NO: 64044 - RNA, 23 nt, Artificial Sequence
  Chemically synthesized
ucaaggaauuucuuaacuucuug

SEQ ID NO: 64045 - RNA, 23 nt, Artificial Sequence
  Chemically synthesized
agauuacaaaucagaagucaucu

SEQ ID NO: 64046 - RNA, 23 nt, Artificial Sequence
  Chemically synthesized
aagauuacaaaucagaagucauc

SEQ ID NO: 64047 - RNA, 23 nt, Artificial Sequence
  Chemically synthesized
uaagauuacaaaucagaagucau

SEQ ID NO: 64048 - RNA, 23 nt, Artificial Sequence
  Chemically synthesized
cuaagauuacaaaucagaaguca

SEQ ID NO: 64049 - RNA, 23 nt, Artificial Sequence
  Chemically synthesized
ccuaagauuacaaaucagaaguc

SEQ ID NO: 64050 - RNA, 23 nt, Artificial Sequence
  Chemically synthesized
cgguuaauuuugaagugcuguuu

SEQ ID NO: 64051 - RNA, 23 nt, Artificial Sequence
  Chemically synthesized
gcgguuaauuuugaagugcuguu

SEQ ID NO: 64052 - RNA, 23 nt, Artificial Sequence
  Chemically synthesized
ugcgguuaauuuugaagugcugu

SEQ ID NO: 64053 - RNA, 23 nt, Artificial Sequence
  Chemically synthesized
augcgguuaauuuugaagugcug

SEQ ID NO: 64054 - RNA, 23 nt, Artificial Sequence
  Chemically synthesized
uaugcgguuaauuuugaagugcu

SEQ ID NO: 64055 - RNA, 23 nt, Artificial Sequence
  Chemically synthesized
gucuugugaaaccuugcugcaag

SEQ ID NO: 64056 - RNA, 23 nt, Artificial Sequence
  Chemically synthesized
ugucuugugaaaccuugcugcaa

SEQ ID NO: 64057 - RNA, 23 nt, Artificial Sequence
  Chemically synthesized
uugucuugugaaaccuugcugca

SEQ ID NO: 64058 - RNA, 23 nt, Artificial Sequence
  Chemically synthesized
cuugucuugugaaaccuugcugc

SEQ ID NO: 64059 - RNA, 23 nt, Artificial Sequence
  Chemically synthesized
ccuugucuugugaaaccuugcug

SEQ ID NO: 64060 - RNA, 23 nt, Artificial Sequence
  Chemically synthesized
aucugggugccuugucuugugaa

SEQ ID NO: 64061 - RNA, 23 nt, Artificial Sequence
  Chemically synthesized
gaaaaaaucugggugccuugucu

SEQ ID NO: 64062 - RNA, 23 nt, Artificial Sequence
  Chemically synthesized
agaaaaaaucugggugccuuguc

SEQ ID NO: 64063 - RNA, 23 nt, Artificial Sequence
  Chemically synthesized
aagaaaaaaucugggugccuugu

SEQ ID NO: 64064 - RNA, 23 nt, Artificial Sequence
  Chemically synthesized
gaagaaaaaaucugggugccuug

SEQ ID NO: 64065 - RNA, 23 nt, Artificial Sequence
  Chemically synthesized
cgauguuauacugauguguuuuu

SEQ ID NO: 64066 - RNA, 23 nt, Artificial Sequence
  Chemically synthesized
ccgauguuauacugauguguuuu

SEQ ID NO: 64067 - RNA, 23 nt, Artificial Sequence
  Chemically synthesized
accgauguuauacugauguguuu

SEQ ID NO: 64068 - RNA, 23 nt, Artificial Sequence
  Chemically synthesized
uaccgauguuauacugauguguu

SEQ ID NO: 64069 - RNA, 23 nt, Artificial Sequence
  Chemically synthesized
auaccgauguuauacugaugugu

SEQ ID NO: 64070 - RNA, 23 nt, Artificial Sequence
  Chemically synthesized
gauaccgauguuauacugaugug

SEQ ID NO: 64071 - RNA, 23 nt, Artificial Sequence
  Chemically synthesized
cccagauaccgauguuauacuga

SEQ ID NO: 64072 - RNA, 23 nt, Artificial Sequence
  Chemically synthesized
acccagauaccgauguuauacug

SEQ ID NO: 64073 - RNA, 23 nt, Artificial Sequence
  Chemically synthesized
uacccagauaccgauguuauacu

SEQ ID NO: 64074 - RNA, 23 nt, Artificial Sequence
  Chemically synthesized
cuacccagauaccgauguuauac

SEQ ID NO: 64075 - RNA, 23 nt, Artificial Sequence
  Chemically synthesized
ccuacccagauaccgauguuaua

SEQ ID NO: 64076 - RNA, 23 nt, Artificial Sequence
  Chemically synthesized
uggguggcacucagucucucuuc

SEQ ID NO: 64077 - RNA, 23 nt, Artificial Sequence
  Chemically synthesized
auggguggcacucagucucucuu

SEQ ID NO: 64078 - RNA, 23 nt, Artificial Sequence
  Chemically synthesized
gcuaaguaaauaggaauugguuu

SEQ ID NO: 64079 - RNA, 23 nt, Artificial Sequence
  Chemically synthesized
gauaaaagauggccauauuaccc

SEQ ID NO: 64080 - RNA, 23 nt, Artificial Sequence
  Chemically synthesized
cuaauacugucauccucaaagaa

SEQ ID NO: 64081 - RNA, 23 nt, Artificial Sequence
  Chemically synthesized
ccuaauacugucauccucaaaga

SEQ ID NO: 64082 - RNA, 23 nt, Artificial Sequence
  Chemically synthesized
uccuaauacugucauccucaaag

SEQ ID NO: 64083 - RNA, 23 nt, Artificial Sequence
  Chemically synthesized
uuccuaauacugucauccucaaa

SEQ ID NO: 64084 - RNA, 23 nt, Artificial Sequence
  Chemically synthesized
uuuccuaauacugucauccucaa

SEQ ID NO: 64085 - RNA, 23 nt, Artificial Sequence
  Chemically synthesized
guggcagaguuacaguucugugg

SEQ ID NO: 64086 - RNA, 23 nt, Artificial Sequence
  Chemically synthesized
uguggcagaguuacaguucugug

SEQ ID NO: 64087 - RNA, 23 nt, Artificial Sequence
  Chemically synthesized
cuguggcagaguuacaguucugu

SEQ ID NO: 64088 - RNA, 23 nt, Artificial Sequence
  Chemically synthesized
gcuguggcagaguuacaguucug

SEQ ID NO: 64089 - RNA, 23 nt, Artificial Sequence
  Chemically synthesized
agcuguggcagaguuacaguucu

SEQ ID NO: 64090 - RNA, 23 nt, Artificial Sequence
  Chemically synthesized
ucuggggugggcaguuuuuugaa

SEQ ID NO: 64091 - RNA, 23 nt, Artificial Sequence
  Chemically synthesized
uccugccuauuaucugucagcug

SEQ ID NO: 64092 - RNA, 23 nt, Artificial Sequence
  Chemically synthesized
guccugccuauuaucugucagcu

SEQ ID NO: 64093 - RNA, 23 nt, Artificial Sequence
  Chemically synthesized
uguccugccuauuaucugucagc

SEQ ID NO: 64094 - RNA, 23 nt, Artificial Sequence
  Chemically synthesized
auguccugccuauuaucugucag

SEQ ID NO: 64095 - RNA, 23 nt, Artificial Sequence
  Chemically synthesized
cauguccugccuauuaucuguca

SEQ ID NO: 64096 - RNA, 23 nt, Artificial Sequence
  Chemically synthesized
caccaggcgcuaauucaaggaau

SEQ ID NO: 64097 - RNA, 23 nt, Artificial Sequence
  Chemically synthesized
ccaguauuuagaagccaacuaug

SEQ ID NO: 64098 - RNA, 23 nt, Artificial Sequence
  Chemically synthesized
accaguauuuagaagccaacuau

SEQ ID NO: 64099 - RNA, 23 nt, Artificial Sequence
  Chemically synthesized
guaugauuacuggccuuuuucau

SEQ ID NO: 64100 - RNA, 23 nt, Artificial Sequence
  Chemically synthesized
uguaugauuacuggccuuuuuca

SEQ ID NO: 64101 - RNA, 23 nt, Artificial Sequence
  Chemically synthesized
aagcuagacgugggaagaaaaaa

SEQ ID NO: 64102 - RNA, 23 nt, Artificial Sequence
  Chemically synthesized
caagcuagacgugggaagaaaaa

SEQ ID NO: 64103 - RNA, 23 nt, Artificial Sequence
  Chemically synthesized
gcaagcuagacgugggaagaaaa

SEQ ID NO: 64104 - RNA, 23 nt, Artificial Sequence
  Chemically synthesized
ugcaagcuagacgugggaagaaa

SEQ ID NO: 64105 - RNA, 23 nt, Artificial Sequence
  Chemically synthesized
gaaggaucuucggaaugaugagc

SEQ ID NO: 64106 - RNA, 23 nt, Artificial Sequence
  Chemically synthesized
agaaggaucuucggaaugaugag

SEQ ID NO: 64107 - RNA, 23 nt, Artificial Sequence
  Chemically synthesized
aagaaggaucuucggaaugauga

SEQ ID NO: 64108 - RNA, 23 nt, Artificial Sequence
  Chemically synthesized
uaagaaggaucuucggaaugaug

SEQ ID NO: 64109 - RNA, 23 nt, Artificial Sequence
  Chemically synthesized
auaagaaggaucuucggaaugau

SEQ ID NO: 64110 - RNA, 23 nt, Artificial Sequence
  Chemically synthesized
gguugggaauaagaaggaucuuc

SEQ ID NO: 64111 - RNA, 23 nt, Artificial Sequence
  Chemically synthesized
ugguugggaauaagaaggaucuu

SEQ ID NO: 64112 - RNA, 23 nt, Artificial Sequence
  Chemically synthesized
cugguugggaauaagaaggaucu

SEQ ID NO: 64113 - RNA, 23 nt, Artificial Sequence
  Chemically synthesized
ccugguugggaauaagaaggauc

SEQ ID NO: 64114 - RNA, 23 nt, Artificial Sequence
  Chemically synthesized
uccugguugggaauaagaaggau

SEQ ID NO: 64115 - RNA, 23 nt, Artificial Sequence
  Chemically synthesized
cuaauagaauaaaggcaguuuuc

SEQ ID NO: 64116 - RNA, 23 nt, Artificial Sequence
  Chemically synthesized
acuaauagaauaaaggcaguuuu

SEQ ID NO: 64117 - RNA, 23 nt, Artificial Sequence
  Chemically synthesized
uacuaauagaauaaaggcaguuu

SEQ ID NO: 64118 - RNA, 23 nt, Artificial Sequence
  Chemically synthesized
cuacuaauagaauaaaggcaguu

SEQ ID NO: 64119 - RNA, 23 nt, Artificial Sequence
  Chemically synthesized
acuacuaauagaauaaaggcagu

SEQ ID NO: 64120 - RNA, 23 nt, Artificial Sequence
  Chemically synthesized
gcacucagucucucuucucucca

SEQ ID NO: 64121 - RNA, 23 nt, Artificial Sequence
  Chemically synthesized
gagcugggcuaaguaaauaggaa

SEQ ID NO: 64122 - RNA, 23 nt, Artificial Sequence
  Chemically synthesized
gucagauggaaaauucauuuuuu

SEQ ID NO: 64123 - RNA, 23 nt, Artificial Sequence
  Chemically synthesized
agucagauggaaaauucauuuuu

SEQ ID NO: 64124 - RNA, 23 nt, Artificial Sequence
  Chemically synthesized
aagucagauggaaaauucauuuu

SEQ ID NO: 64125 - RNA, 23 nt, Artificial Sequence
  Chemically synthesized
aaagucagauggaaaauucauuu

SEQ ID NO: 64126 - RNA, 23 nt, Artificial Sequence
  Chemically synthesized
uaaagucagauggaaaauucauu

SEQ ID NO: 64127 - RNA, 23 nt, Artificial Sequence
  Chemically synthesized
caaagaaaguguauugguuuuuu

SEQ ID NO: 64128 - RNA, 23 nt, Artificial Sequence
  Chemically synthesized
ucaaagaaaguguauugguuuuu

SEQ ID NO: 64129 - RNA, 23 nt, Artificial Sequence
  Chemically synthesized
cucaaagaaaguguauugguuuu

SEQ ID NO: 64130 - RNA, 23 nt, Artificial Sequence
  Chemically synthesized
ccucaaagaaaguguauugguuu

SEQ ID NO: 64131 - RNA, 23 nt, Artificial Sequence
  Chemically synthesized
uccucaaagaaaguguauugguu

SEQ ID NO: 64132 - RNA, 23 nt, Artificial Sequence
  Chemically synthesized
gauuuccuaauacugucauccuc

SEQ ID NO: 64133 - RNA, 23 nt, Artificial Sequence
  Chemically synthesized
agauuuuguuggcauagcucugg

SEQ ID NO: 64134 - RNA, 23 nt, Artificial Sequence
  Chemically synthesized
cagauuuuguuggcauagcucug

SEQ ID NO: 64135 - RNA, 23 nt, Artificial Sequence
  Chemically synthesized
acagauuuuguuggcauagcucu

SEQ ID NO: 64136 - RNA, 23 nt, Artificial Sequence
  Chemically synthesized
aacagauuuuguuggcauagcuc

SEQ ID NO: 64137 - RNA, 23 nt, Artificial Sequence
  Chemically synthesized
uaacagauuuuguuggcauagcu

SEQ ID NO: 64138 - RNA, 23 nt, Artificial Sequence
  Chemically synthesized
uauuuagaagccaacuaugauua

SEQ ID NO: 64139 - RNA, 23 nt, Artificial Sequence
  Chemically synthesized
guauuuagaagccaacuaugauu

SEQ ID NO: 64140 - RNA, 23 nt, Artificial Sequence
  Chemically synthesized
cagaagucaucuugcuaccagua

SEQ ID NO: 64141 - RNA, 23 nt, Artificial Sequence
  Chemically synthesized
ucagaagucaucuugcuaccagu

SEQ ID NO: 64142 - RNA, 23 nt, Artificial Sequence
  Chemically synthesized
aucagaagucaucuugcuaccag

SEQ ID NO: 64143 - RNA, 23 nt, Artificial Sequence
  Chemically synthesized
uaugauuacuggccuuuuucauu

SEQ ID NO: 64144 - RNA, 23 nt, Artificial Sequence
  Chemically synthesized
uuugaagugcuguuuauuaaucu

SEQ ID NO: 64145 - RNA, 23 nt, Artificial Sequence
  Chemically synthesized
uuuugaagugcuguuuauuaauc

SEQ ID NO: 64146 - RNA, 23 nt, Artificial Sequence
  Chemically synthesized
uuaugcgguuaauuuugaagugc

SEQ ID NO: 64147 - RNA, 23 nt, Artificial Sequence
  Chemically synthesized
cuuaugcgguuaauuuugaagug

SEQ ID NO: 64148 - RNA, 23 nt, Artificial Sequence
  Chemically synthesized
gacgugggaagaaaaaaucuggg

SEQ ID NO: 64149 - RNA, 23 nt, Artificial Sequence
  Chemically synthesized
agagguuuuugaaauggcuacga

SEQ ID NO: 64150 - RNA, 23 nt, Artificial Sequence
  Chemically synthesized
gagagguuuuugaaauggcuacg

SEQ ID NO: 64151 - RNA, 23 nt, Artificial Sequence
  Chemically synthesized
agagagguuuuugaaauggcuac

SEQ ID NO: 64152 - RNA, 23 nt, Artificial Sequence
  Chemically synthesized
aucuucggaaugaugagcacaca

SEQ ID NO: 64153 - RNA, 23 nt, Artificial Sequence
  Chemically synthesized
ggaccccagaagucaagcauuuc

SEQ ID NO: 64154 - RNA, 23 nt, Artificial Sequence
  Chemically synthesized
agauuaugaucgccugaggcccc

SEQ ID NO: 64155 - RNA, 23 nt, Artificial Sequence
  Chemically synthesized
aagauuaugaucgccugaggccc

SEQ ID NO: 64156 - RNA, 23 nt, Artificial Sequence
  Chemically synthesized
gaagauuaugaucgccugaggcc

SEQ ID NO: 64157 - RNA, 23 nt, Artificial Sequence
  Chemically synthesized
ugggcaggaagauuaugaucgcc

SEQ ID NO: 64158 - RNA, 23 nt, Artificial Sequence
  Chemically synthesized
cugggcaggaagauuaugaucgc

SEQ ID NO: 64159 - RNA, 23 nt, Artificial Sequence
  Chemically synthesized
gcugggcaggaagauuaugaucg

SEQ ID NO: 64160 - RNA, 23 nt, Artificial Sequence
  Chemically synthesized
agcugggcaggaagauuaugauc

SEQ ID NO: 64161 - RNA, 23 nt, Artificial Sequence
  Chemically synthesized
cagcugggcaggaagauuaugau

SEQ ID NO: 64162 - RNA, 23 nt, Artificial Sequence
  Chemically synthesized
acagcugggcaggaagauuauga

SEQ ID NO: 64163 - RNA, 23 nt, Artificial Sequence
  Chemically synthesized
cacagcugggcaggaagauuaug

SEQ ID NO: 64164 - RNA, 23 nt, Artificial Sequence
  Chemically synthesized
acacagcugggcaggaagauuau

SEQ ID NO: 64165 - RNA, 23 nt, Artificial Sequence
  Chemically synthesized
gacacagcugggcaggaagauua

SEQ ID NO: 64166 - RNA, 23 nt, Artificial Sequence
  Chemically synthesized
cagguagaguuggcuuuguggga

SEQ ID NO: 64167 - RNA, 23 nt, Artificial Sequence
  Chemically synthesized
gcagguagaguuggcuuuguggg

SEQ ID NO: 64168 - RNA, 23 nt, Artificial Sequence
  Chemically synthesized
agcagguagaguuggcuuugugg

SEQ ID NO: 64169 - RNA, 23 nt, Artificial Sequence
  Chemically synthesized
aagcagguagaguuggcuuugug

SEQ ID NO: 64170 - RNA, 23 nt, Artificial Sequence
  Chemically synthesized
ggcagauaucgagguggauggaa

SEQ ID NO: 64171 - RNA, 23 nt, Artificial Sequence
  Chemically synthesized
uggcagauaucgagguggaugga

SEQ ID NO: 64172 - RNA, 23 nt, Artificial Sequence
  Chemically synthesized
guggcagauaucgagguggaugg

SEQ ID NO: 64173 - RNA, 23 nt, Artificial Sequence
  Chemically synthesized
uguggcagauaucgagguggaug

SEQ ID NO: 64174 - RNA, 23 nt, Artificial Sequence
  Chemically synthesized
auguggcagauaucgagguggau

SEQ ID NO: 64175 - RNA, 23 nt, Artificial Sequence
  Chemically synthesized
caauuagacacuuuggaagaugg

SEQ ID NO: 64176 - RNA, 23 nt, Artificial Sequence
  Chemically synthesized
acgccugaggcaauuagacacuu

SEQ ID NO: 64177 - RNA, 23 nt, Artificial Sequence
  Chemically synthesized
ggagcugggcuaaguaaauagga

SEQ ID NO: 64178 - RNA, 23 nt, Artificial Sequence
  Chemically synthesized
uggagcugggcuaaguaaauagg

SEQ ID NO: 64179 - RNA, 23 nt, Artificial Sequence
  Chemically synthesized
auggagcugggcuaaguaaauag

SEQ ID NO: 64180 - RNA, 23 nt, Artificial Sequence
  Chemically synthesized
cauggagcugggcuaaguaaaua

SEQ ID NO: 64181 - RNA, 23 nt, Artificial Sequence
  Chemically synthesized
ccauggagcugggcuaaguaaau

SEQ ID NO: 64182 - RNA, 23 nt, Artificial Sequence
  Chemically synthesized
guucugugguuucauguuaguua

SEQ ID NO: 64183 - RNA, 23 nt, Artificial Sequence
  Chemically synthesized
aguucugugguuucauguuaguu

SEQ ID NO: 64184 - RNA, 23 nt, Artificial Sequence
  Chemically synthesized
caguucugugguuucauguuagu

SEQ ID NO: 64185 - RNA, 23 nt, Artificial Sequence
  Chemically synthesized
acaguucugugguuucauguuag

SEQ ID NO: 64186 - RNA, 23 nt, Artificial Sequence
  Chemically synthesized
uacaguucugugguuucauguua

SEQ ID NO: 64187 - RNA, 23 nt, Artificial Sequence
  Chemically synthesized
uuacaguucugugguuucauguu

SEQ ID NO: 64188 - RNA, 23 nt, Artificial Sequence
  Chemically synthesized
guuacaguucugugguuucaugu

SEQ ID NO: 64189 - RNA, 23 nt, Artificial Sequence
  Chemically synthesized
aguuacaguucugugguuucaug

SEQ ID NO: 64190 - RNA, 23 nt, Artificial Sequence
  Chemically synthesized
guaacagauuuuguuggcauagc

SEQ ID NO: 64191 - RNA, 23 nt, Artificial Sequence
  Chemically synthesized
cguaacagauuuuguuggcauag

SEQ ID NO: 64192 - RNA, 23 nt, Artificial Sequence
  Chemically synthesized
ccguaacagauuuuguuggcaua

SEQ ID NO: 64193 - RNA, 23 nt, Artificial Sequence
  Chemically synthesized
acauguccugccuauuaucuguc

SEQ ID NO: 64194 - RNA, 23 nt, Artificial Sequence
  Chemically synthesized
cuuaacuucuugcuucuuucuag

SEQ ID NO: 64195 - RNA, 23 nt, Artificial Sequence
  Chemically synthesized
ucuuaacuucuugcuucuuucua

SEQ ID NO: 64196 - RNA, 23 nt, Artificial Sequence
  Chemically synthesized
uucuuaacuucuugcuucuuucu

SEQ ID NO: 64197 - RNA, 23 nt, Artificial Sequence
  Chemically synthesized
uuucuuaacuucuugcuucuuuc

SEQ ID NO: 64198 - RNA, 23 nt, Artificial Sequence
  Chemically synthesized
auuucuuaacuucuugcuucuuu

SEQ ID NO: 64199 - RNA, 23 nt, Artificial Sequence
  Chemically synthesized
acaccaggcgcuaauucaaggaa

SEQ ID NO: 64200 - RNA, 23 nt, Artificial Sequence
  Chemically synthesized
cacaccaggcgcuaauucaagga

SEQ ID NO: 64201 - RNA, 23 nt, Artificial Sequence
  Chemically synthesized
accuaagauuacaaaucagaagu

SEQ ID NO: 64202 - RNA, 23 nt, Artificial Sequence
  Chemically synthesized
uaccuaagauuacaaaucagaag

SEQ ID NO: 64203 - RNA, 23 nt, Artificial Sequence
  Chemically synthesized
uuaccuaagauuacaaaucagaa

SEQ ID NO: 64204 - RNA, 23 nt, Artificial Sequence
  Chemically synthesized
aaucugggugccuugucuuguga

SEQ ID NO: 64205 - RNA, 23 nt, Artificial Sequence
  Chemically synthesized
agauaccgauguuauacugaugu

SEQ ID NO: 64206 - RNA, 23 nt, Artificial Sequence
  Chemically synthesized
cagauaccgauguuauacugaug

SEQ ID NO: 64207 - RNA, 23 nt, Artificial Sequence
  Chemically synthesized
ccagauaccgauguuauacugau

SEQ ID NO: 64208 - RNA, 23 nt, Artificial Sequence
  Chemically synthesized
uccuacccagauaccgauguuau

SEQ ID NO: 64209 - RNA, 23 nt, Artificial Sequence
  Chemically synthesized
agaguuggcuuugugggacacag

SEQ ID NO: 64210 - RNA, 23 nt, Artificial Sequence
  Chemically synthesized
uagaguuggcuuugugggacaca

SEQ ID NO: 64211 - RNA, 23 nt, Artificial Sequence
  Chemically synthesized
guagaguuggcuuugugggacac

SEQ ID NO: 64212 - RNA, 23 nt, Artificial Sequence
  Chemically synthesized
gguagaguuggcuuugugggaca

SEQ ID NO: 64213 - RNA, 23 nt, Artificial Sequence
  Chemically synthesized
agguagaguuggcuuugugggac

SEQ ID NO: 64214 - RNA, 23 nt, Artificial Sequence
  Chemically synthesized
ggaaagcagguagaguuggcuuu

SEQ ID NO: 64215 - RNA, 23 nt, Artificial Sequence
  Chemically synthesized
uauguggcagauaucgaggugga

SEQ ID NO: 64216 - RNA, 23 nt, Artificial Sequence
  Chemically synthesized
gcauaaccugucucaccuggacu

SEQ ID NO: 64217 - RNA, 23 nt, Artificial Sequence
  Chemically synthesized
ggcauaaccugucucaccuggac

SEQ ID NO: 64218 - RNA, 23 nt, Artificial Sequence
  Chemically synthesized
uggcauaaccugucucaccugga

SEQ ID NO: 64219 - RNA, 23 nt, Artificial Sequence
  Chemically synthesized
auggcauaaccugucucaccugg

SEQ ID NO: 64220 - RNA, 23 nt, Artificial Sequence
  Chemically synthesized
gauggcauaaccugucucaccug

SEQ ID NO: 64221 - RNA, 23 nt, Artificial Sequence
  Chemically synthesized
auaaagucagauggaaaauucau

SEQ ID NO: 64222 - RNA, 23 nt, Artificial Sequence
  Chemically synthesized
aauaaagucagauggaaaauuca

SEQ ID NO: 64223 - RNA, 23 nt, Artificial Sequence
  Chemically synthesized
aaauaaagucagauggaaaauuc

SEQ ID NO: 64224 - RNA, 23 nt, Artificial Sequence
  Chemically synthesized
auuuccuaauacugucauccuca

SEQ ID NO: 64225 - RNA, 23 nt, Artificial Sequence
  Chemically synthesized
guuucauguuaguuaccuuauag

SEQ ID NO: 64226 - RNA, 23 nt, Artificial Sequence
  Chemically synthesized
gguuucauguuaguuaccuuaua

SEQ ID NO: 64227 - RNA, 23 nt, Artificial Sequence
  Chemically synthesized
ugguuucauguuaguuaccuuau

SEQ ID NO: 64228 - RNA, 23 nt, Artificial Sequence
  Chemically synthesized
gugguuucauguuaguuaccuua

SEQ ID NO: 64229 - RNA, 23 nt, Artificial Sequence
  Chemically synthesized
ugugguuucauguuaguuaccuu

SEQ ID NO: 64230 - RNA, 23 nt, Artificial Sequence
  Chemically synthesized
gccuauuaucugucagcugcaag

SEQ ID NO: 64231 - RNA, 23 nt, Artificial Sequence
  Chemically synthesized
ugccuauuaucugucagcugcaa

SEQ ID NO: 64232 - RNA, 23 nt, Artificial Sequence
  Chemically synthesized
cugccuauuaucugucagcugca

SEQ ID NO: 64233 - RNA, 23 nt, Artificial Sequence
  Chemically synthesized
ccugccuauuaucugucagcugc

SEQ ID NO: 64234 - RNA, 23 nt, Artificial Sequence
  Chemically synthesized
uucaaggaauuucuuaacuucuu

SEQ ID NO: 64235 - RNA, 23 nt, Artificial Sequence
  Chemically synthesized
auucaaggaauuucuuaacuucu

SEQ ID NO: 64236 - RNA, 23 nt, Artificial Sequence
  Chemically synthesized
aauucaaggaauuucuuaacuuc

SEQ ID NO: 64237 - RNA, 23 nt, Artificial Sequence
  Chemically synthesized
agguuuuugaaauggcuacgaga

SEQ ID NO: 64238 - RNA, 23 nt, Artificial Sequence
  Chemically synthesized
gagguuuuugaaauggcuacgag

SEQ ID NO: 64239 - RNA, 23 nt, Artificial Sequence
  Chemically synthesized
gggagcuagccaagaugaagcag

SEQ ID NO: 64240 - RNA, 23 nt, Artificial Sequence
  Chemically synthesized
cgggagcuagccaagaugaagca

SEQ ID NO: 64241 - RNA, 23 nt, Artificial Sequence
  Chemically synthesized
gcgggagcuagccaagaugaagc

SEQ ID NO: 64242 - RNA, 23 nt, Artificial Sequence
  Chemically synthesized
ggcgggagcuagccaagaugaag

SEQ ID NO: 64243 - RNA, 23 nt, Artificial Sequence
  Chemically synthesized
aggcgggagcuagccaagaugaa

SEQ ID NO: 64244 - RNA, 23 nt, Artificial Sequence
  Chemically synthesized
auccugguugggaauaagaagga

SEQ ID NO: 64245 - RNA, 23 nt, Artificial Sequence
  Chemically synthesized
uccaucgacagcccugauaguuu

SEQ ID NO: 64246 - RNA, 23 nt, Artificial Sequence
  Chemically synthesized
uuccaucgacagcccugauaguu

SEQ ID NO: 64247 - RNA, 23 nt, Artificial Sequence
  Chemically synthesized
uuuccaucgacagcccugauagu

SEQ ID NO: 64248 - RNA, 23 nt, Artificial Sequence
  Chemically synthesized
uuuuccaucgacagcccugauag

SEQ ID NO: 64249 - RNA, 23 nt, Artificial Sequence
  Chemically synthesized
uuuuuccaucgacagcccugaua

SEQ ID NO: 64250 - RNA, 23 nt, Artificial Sequence
  Chemically synthesized
gcugacuaaacuuuuuuucugua

SEQ ID NO: 64251 - RNA, 23 nt, Artificial Sequence
  Chemically synthesized
agcugacuaaacuuuuuuucugu

SEQ ID NO: 64252 - RNA, 23 nt, Artificial Sequence
  Chemically synthesized
cagcugacuaaacuuuuuuucug

SEQ ID NO: 64253 - RNA, 23 nt, Artificial Sequence
  Chemically synthesized
ccagcugacuaaacuuuuuuucu

SEQ ID NO: 64254 - RNA, 23 nt, Artificial Sequence
  Chemically synthesized
uccagcugacuaaacuuuuuuuc

SEQ ID NO: 64255 - RNA, 23 nt, Artificial Sequence
  Chemically synthesized
cacucagucucucuucucuccag

SEQ ID NO: 64256 - RNA, 23 nt, Artificial Sequence
  Chemically synthesized
ccaguucccagagguguaugugc

SEQ ID NO: 64257 - RNA, 23 nt, Artificial Sequence
  Chemically synthesized
accaguucccagagguguaugug

SEQ ID NO: 64258 - RNA, 23 nt, Artificial Sequence
  Chemically synthesized
gaccaguucccagagguguaugu

SEQ ID NO: 64259 - RNA, 23 nt, Artificial Sequence
  Chemically synthesized
ggaccaguucccagagguguaug

SEQ ID NO: 64260 - RNA, 23 nt, Artificial Sequence
  Chemically synthesized
aggaccaguucccagagguguau

SEQ ID NO: 64261 - RNA, 23 nt, Artificial Sequence
  Chemically synthesized
gguuaauuuugaagugcuguuua

SEQ ID NO: 64262 - RNA, 23 nt, Artificial Sequence
  Chemically synthesized
cuccuacccagauaccgauguua

SEQ ID NO: 64263 - RNA, 23 nt, Artificial Sequence
  Chemically synthesized
ucuccuacccagauaccgauguu

SEQ ID NO: 64264 - RNA, 23 nt, Artificial Sequence
  Chemically synthesized
cucuccuacccagauaccgaugu

SEQ ID NO: 64265 - RNA, 23 nt, Artificial Sequence
  Chemically synthesized
gguggauggaaagcagguagagu

SEQ ID NO: 64266 - RNA, 23 nt, Artificial Sequence
  Chemically synthesized
agguggauggaaagcagguagag

SEQ ID NO: 64267 - RNA, 23 nt, Artificial Sequence
  Chemically synthesized
gagguggauggaaagcagguaga

SEQ ID NO: 64268 - RNA, 23 nt, Artificial Sequence
  Chemically synthesized
cgagguggauggaaagcagguag

SEQ ID NO: 64269 - RNA, 23 nt, Artificial Sequence
  Chemically synthesized
ucgagguggauggaaagcaggua

SEQ ID NO: 64270 - RNA, 23 nt, Artificial Sequence
  Chemically synthesized
gcagauaucgagguggauggaaa

SEQ ID NO: 64271 - RNA, 23 nt, Artificial Sequence
  Chemically synthesized
gcucuuuucuccucacuguaucc

SEQ ID NO: 64272 - RNA, 23 nt, Artificial Sequence
  Chemically synthesized
ugcucuuuucuccucacuguauc

SEQ ID NO: 64273 - RNA, 23 nt, Artificial Sequence
  Chemically synthesized
cacgccugaggcaauuagacacu

SEQ ID NO: 64274 - RNA, 23 nt, Artificial Sequence
  Chemically synthesized
gaaauaaagucagauggaaaauu

SEQ ID NO: 64275 - RNA, 23 nt, Artificial Sequence
  Chemically synthesized
ggaaauaaagucagauggaaaau

SEQ ID NO: 64276 - RNA, 23 nt, Artificial Sequence
  Chemically synthesized
cugugguuucauguuaguuaccu

SEQ ID NO: 64277 - RNA, 23 nt, Artificial Sequence
  Chemically synthesized
ucugugguuucauguuaguuacc

SEQ ID NO: 64278 - RNA, 23 nt, Artificial Sequence
  Chemically synthesized
uucugugguuucauguuaguuac

SEQ ID NO: 64279 - RNA, 23 nt, Artificial Sequence
  Chemically synthesized
ggaucuucggaaugaugagcaca

SEQ ID NO: 64280 - RNA, 23 nt, Artificial Sequence
  Chemically synthesized
aggaucuucggaaugaugagcac

SEQ ID NO: 64281 - RNA, 23 nt, Artificial Sequence
  Chemically synthesized
aaggaucuucggaaugaugagca

SEQ ID NO: 64282 - RNA, 23 nt, Artificial Sequence
  Chemically synthesized
gauguuauacugauguguuuuuc

SEQ ID NO: 64283 - RNA, 23 nt, Artificial Sequence
  Chemically synthesized
gaacuauguggcagauaucgagg

SEQ ID NO: 64284 - RNA, 23 nt, Artificial Sequence
  Chemically synthesized
cgucgguucucucguuaguccac

SEQ ID NO: 64285 - RNA, 23 nt, Artificial Sequence
  Chemically synthesized
ccgucgguucucucguuagucca

SEQ ID NO: 64286 - RNA, 23 nt, Artificial Sequence
  Chemically synthesized
uccgucgguucucucguuagucc

SEQ ID NO: 64287 - RNA, 23 nt, Artificial Sequence
  Chemically synthesized
cuccgucgguucucucguuaguc

SEQ ID NO: 64288 - RNA, 23 nt, Artificial Sequence
  Chemically synthesized
ccuccgucgguucucucguuagu

SEQ ID NO: 64289 - RNA, 23 nt, Artificial Sequence
  Chemically synthesized
cugucauccucaaagaaagugua

SEQ ID NO: 64290 - RNA, 23 nt, Artificial Sequence
  Chemically synthesized
acugucauccucaaagaaagugu

SEQ ID NO: 64291 - RNA, 23 nt, Artificial Sequence
  Chemically synthesized
uacugucauccucaaagaaagug

SEQ ID NO: 64292 - RNA, 23 nt, Artificial Sequence
  Chemically synthesized
auacugucauccucaaagaaagu

SEQ ID NO: 64293 - RNA, 23 nt, Artificial Sequence
  Chemically synthesized
aauacugucauccucaaagaaag

SEQ ID NO: 64294 - RNA, 23 nt, Artificial Sequence
  Chemically synthesized
uaauacugucauccucaaagaaa

SEQ ID NO: 64295 - RNA, 23 nt, Artificial Sequence
  Chemically synthesized
ggauggaaagcagguagaguugg

SEQ ID NO: 64296 - RNA, 23 nt, Artificial Sequence
  Chemically synthesized
uggauggaaagcagguagaguug

SEQ ID NO: 64297 - RNA, 23 nt, Artificial Sequence
  Chemically synthesized
guggauggaaagcagguagaguu

SEQ ID NO: 64298 - RNA, 23 nt, Artificial Sequence
  Chemically synthesized
auaucgagguggauggaaagcag

SEQ ID NO: 64299 - RNA, 23 nt, Artificial Sequence
  Chemically synthesized
gauaucgagguggauggaaagca

SEQ ID NO: 64300 - RNA, 23 nt, Artificial Sequence
  Chemically synthesized
agauaucgagguggauggaaagc

SEQ ID NO: 64301 - RNA, 23 nt, Artificial Sequence
  Chemically synthesized
cagauaucgagguggauggaaag

SEQ ID NO: 64302 - RNA, 23 nt, Artificial Sequence
  Chemically synthesized
cagucucucuucucuccagcuga

SEQ ID NO: 64303 - RNA, 23 nt, Artificial Sequence
  Chemically synthesized
ucagucucucuucucuccagcug

SEQ ID NO: 64304 - RNA, 23 nt, Artificial Sequence
  Chemically synthesized
cucagucucucuucucuccagcu

SEQ ID NO: 64305 - RNA, 23 nt, Artificial Sequence
  Chemically synthesized
acucagucucucuucucuccagc

SEQ ID NO: 64306 - RNA, 23 nt, Artificial Sequence
  Chemically synthesized
cucuuuucuccucacuguaucca

SEQ ID NO: 64307 - RNA, 23 nt, Artificial Sequence
  Chemically synthesized
gaccaaagauggagugagagagg

SEQ ID NO: 64308 - RNA, 23 nt, Artificial Sequence
  Chemically synthesized
agaccaaagauggagugagagag

SEQ ID NO: 64309 - RNA, 23 nt, Artificial Sequence
  Chemically synthesized
aagaccaaagauggagugagaga

SEQ ID NO: 64310 - RNA, 23 nt, Artificial Sequence
  Chemically synthesized
aaagaccaaagauggagugagag

SEQ ID NO: 64311 - RNA, 23 nt, Artificial Sequence
  Chemically synthesized
caaagaccaaagauggagugaga

SEQ ID NO: 64312 - RNA, 23 nt, Artificial Sequence
  Chemically synthesized
ggagcuagccaagaugaagcagg

SEQ ID NO: 64313 - RNA, 23 nt, Artificial Sequence
  Chemically synthesized
auccucaaagaaaguguauuggu

SEQ ID NO: 64314 - RNA, 23 nt, Artificial Sequence
  Chemically synthesized
cugcaagguacucuggugaguca

SEQ ID NO: 64315 - RNA, 23 nt, Artificial Sequence
  Chemically synthesized
gcugcaagguacucuggugaguc

SEQ ID NO: 64316 - RNA, 23 nt, Artificial Sequence
  Chemically synthesized
agcugcaagguacucuggugagu

SEQ ID NO: 64317 - RNA, 23 nt, Artificial Sequence
  Chemically synthesized
cagcugcaagguacucuggugag

SEQ ID NO: 64318 - RNA, 23 nt, Artificial Sequence
  Chemically synthesized
ucagcugcaagguacucugguga

SEQ ID NO: 64319 - RNA, 23 nt, Artificial Sequence
  Chemically synthesized
caggguccuuuugacacugcucu

SEQ ID NO: 64320 - RNA, 23 nt, Artificial Sequence
  Chemically synthesized
ccaggguccuuuugacacugcuc

SEQ ID NO: 64321 - RNA, 23 nt, Artificial Sequence
  Chemically synthesized
accaggguccuuuugacacugcu

SEQ ID NO: 64322 - RNA, 23 nt, Artificial Sequence
  Chemically synthesized
acagcccuuaugcgguuaauuuu

SEQ ID NO: 64323 - RNA, 23 nt, Artificial Sequence
  Chemically synthesized
cacagcccuuaugcgguuaauuu

SEQ ID NO: 64324 - RNA, 23 nt, Artificial Sequence
  Chemically synthesized
gcacagcccuuaugcgguuaauu

SEQ ID NO: 64325 - RNA, 23 nt, Artificial Sequence
  Chemically synthesized
agcacagcccuuaugcgguuaau

SEQ ID NO: 64326 - RNA, 23 nt, Artificial Sequence
  Chemically synthesized
aagcacagcccuuaugcgguuaa

SEQ ID NO: 64327 - RNA, 23 nt, Artificial Sequence
  Chemically synthesized
ucauccugguugggaauaagaag

SEQ ID NO: 64328 - RNA, 23 nt, Artificial Sequence
  Chemically synthesized
aucauccugguugggaauaagaa

SEQ ID NO: 64329 - RNA, 23 nt, Artificial Sequence
  Chemically synthesized
caucauccugguugggaauaaga

SEQ ID NO: 64330 - RNA, 23 nt, Artificial Sequence
  Chemically synthesized
ccaucauccugguugggaauaag

SEQ ID NO: 64331 - RNA, 23 nt, Artificial Sequence
  Chemically synthesized
cccaucauccugguugggaauaa

SEQ ID NO: 64332 - RNA, 23 nt, Artificial Sequence
  Chemically synthesized
auggaaagcagguagaguuggcu

SEQ ID NO: 64333 - RNA, 23 nt, Artificial Sequence
  Chemically synthesized
gauggaaagcagguagaguuggc

SEQ ID NO: 64334 - RNA, 23 nt, Artificial Sequence
  Chemically synthesized
ggaauugguuucacgccugaggc

SEQ ID NO: 64335 - RNA, 23 nt, Artificial Sequence
  Chemically synthesized
aggaauugguuucacgccugagg

SEQ ID NO: 64336 - RNA, 23 nt, Artificial Sequence
  Chemically synthesized
uaggaauugguuucacgccugag

SEQ ID NO: 64337 - RNA, 23 nt, Artificial Sequence
  Chemically synthesized
auaggaauugguuucacgccuga

SEQ ID NO: 64338 - RNA, 23 nt, Artificial Sequence
  Chemically synthesized
aauaggaauugguuucacgccug

SEQ ID NO: 64339 - RNA, 23 nt, Artificial Sequence
  Chemically synthesized
aguauuuagaagccaacuaugau

SEQ ID NO: 64340 - RNA, 23 nt, Artificial Sequence
  Chemically synthesized
caguauuuagaagccaacuauga

SEQ ID NO: 64341 - RNA, 23 nt, Artificial Sequence
  Chemically synthesized
cagcccuuaugcgguuaauuuug

SEQ ID NO: 64342 - RNA, 23 nt, Artificial Sequence
  Chemically synthesized
gccuugucuugugaaaccuugcu

SEQ ID NO: 64343 - RNA, 23 nt, Artificial Sequence
  Chemically synthesized
ugccuugucuugugaaaccuugc

SEQ ID NO: 64344 - RNA, 23 nt, Artificial Sequence
  Chemically synthesized
gugccuugucuugugaaaccuug

SEQ ID NO: 64345 - RNA, 23 nt, Artificial Sequence
  Chemically synthesized
cgguucucucguuaguccacggu

SEQ ID NO: 64346 - RNA, 23 nt, Artificial Sequence
  Chemically synthesized
ucgguucucucguuaguccacgg

SEQ ID NO: 64347 - RNA, 23 nt, Artificial Sequence
  Chemically synthesized
gucgguucucucguuaguccacg

SEQ ID NO: 64348 - RNA, 23 nt, Artificial Sequence
  Chemically synthesized
gccggugaaaccugaagaaggca

SEQ ID NO: 64349 - RNA, 23 nt, Artificial Sequence
  Chemically synthesized
agccggugaaaccugaagaaggc

SEQ ID NO: 64350 - RNA, 23 nt, Artificial Sequence
  Chemically synthesized
gagccggugaaaccugaagaagg

SEQ ID NO: 64351 - RNA, 23 nt, Artificial Sequence
  Chemically synthesized
ggagccggugaaaccugaagaag

SEQ ID NO: 64352 - RNA, 23 nt, Artificial Sequence
  Chemically synthesized
aggagccggugaaaccugaagaa

SEQ ID NO: 64353 - RNA, 23 nt, Artificial Sequence
  Chemically synthesized
gggcaggaagauuaugaucgccu

SEQ ID NO: 64354 - RNA, 23 nt, Artificial Sequence
  Chemically synthesized
ccaguuaauuuuuccaacuacua

SEQ ID NO: 64355 - RNA, 23 nt, Artificial Sequence
  Chemically synthesized
uggagccuguggaaagacaugcu

SEQ ID NO: 64356 - RNA, 23 nt, Artificial Sequence
  Chemically synthesized
auggagccuguggaaagacaugc

SEQ ID NO: 64357 - RNA, 23 nt, Artificial Sequence
  Chemically synthesized
gauggagccuguggaaagacaug

SEQ ID NO: 64358 - RNA, 23 nt, Artificial Sequence
  Chemically synthesized
ugauggagccuguggaaagacau

SEQ ID NO: 64359 - RNA, 23 nt, Artificial Sequence
  Chemically synthesized
gcccuuaugcgguuaauuuugaa

SEQ ID NO: 64360 - RNA, 23 nt, Artificial Sequence
  Chemically synthesized
agcccuuaugcgguuaauuuuga

SEQ ID NO: 64361 - RNA, 23 nt, Artificial Sequence
  Chemically synthesized
gcaaagaccaaagauggagugag

SEQ ID NO: 64362 - RNA, 23 nt, Artificial Sequence
  Chemically synthesized
gcccaucauccugguugggaaua

SEQ ID NO: 64363 - RNA, 23 nt, Artificial Sequence
  Chemically synthesized
ugcccaucauccugguugggaau

SEQ ID NO: 64364 - RNA, 23 nt, Artificial Sequence
  Chemically synthesized
gugcccaucauccugguugggaa

SEQ ID NO: 64365 - RNA, 23 nt, Artificial Sequence
  Chemically synthesized
cuccagcugacuaaacuuuuuuu

SEQ ID NO: 64366 - RNA, 23 nt, Artificial Sequence
  Chemically synthesized
ucuccagcugacuaaacuuuuuu

SEQ ID NO: 64367 - RNA, 23 nt, Artificial Sequence
  Chemically synthesized
cucuccagcugacuaaacuuuuu

SEQ ID NO: 64368 - RNA, 23 nt, Artificial Sequence
  Chemically synthesized
cccguuuugucacuuuuucugau

SEQ ID NO: 64369 - RNA, 23 nt, Artificial Sequence
  Chemically synthesized
ucccguuuugucacuuuuucuga

SEQ ID NO: 64370 - RNA, 23 nt, Artificial Sequence
  Chemically synthesized
uucccguuuugucacuuuuucug

SEQ ID NO: 64371 - RNA, 23 nt, Artificial Sequence
  Chemically synthesized
auucccguuuugucacuuuuucu

SEQ ID NO: 64372 - RNA, 23 nt, Artificial Sequence
  Chemically synthesized
aauucccguuuugucacuuuuuc

SEQ ID NO: 64373 - RNA, 23 nt, Artificial Sequence
  Chemically synthesized
gaguuacaguucugugguuucau

SEQ ID NO: 64374 - RNA, 23 nt, Artificial Sequence
  Chemically synthesized
agaguuacaguucugugguuuca

SEQ ID NO: 64375 - RNA, 23 nt, Artificial Sequence
  Chemically synthesized
cagaguuacaguucugugguuuc

SEQ ID NO: 64376 - RNA, 23 nt, Artificial Sequence
  Chemically synthesized
caccaggguccuuuugacacugc

SEQ ID NO: 64377 - RNA, 23 nt, Artificial Sequence
  Chemically synthesized
ccaccaggguccuuuugacacug

SEQ ID NO: 64378 - RNA, 23 nt, Artificial Sequence
  Chemically synthesized
cccaccaggguccuuuugacacu

SEQ ID NO: 64379 - RNA, 23 nt, Artificial Sequence
  Chemically synthesized
accaaagauggagugagagaggu

SEQ ID NO: 64380 - RNA, 23 nt, Artificial Sequence
  Chemically synthesized
gaguuggcuuugugggacacagc

SEQ ID NO: 64381 - RNA, 23 nt, Artificial Sequence
  Chemically synthesized
ugugcccacaguguuugagaacu

SEQ ID NO: 64382 - RNA, 23 nt, Artificial Sequence
  Chemically synthesized
augugcccacaguguuugagaac

SEQ ID NO: 64383 - RNA, 23 nt, Artificial Sequence
  Chemically synthesized
uaugugcccacaguguuugagaa

SEQ ID NO: 64384 - RNA, 23 nt, Artificial Sequence
  Chemically synthesized
ccucacuguauccagguucccuc

SEQ ID NO: 64385 - RNA, 23 nt, Artificial Sequence
  Chemically synthesized
uccucacuguauccagguucccu

SEQ ID NO: 64386 - RNA, 23 nt, Artificial Sequence
  Chemically synthesized
cuccucacuguauccagguuccc

SEQ ID NO: 64387 - RNA, 23 nt, Artificial Sequence
  Chemically synthesized
ucuccucacuguauccagguucc

SEQ ID NO: 64388 - RNA, 23 nt, Artificial Sequence
  Chemically synthesized
uucuccucacuguauccagguuc

SEQ ID NO: 64389 - RNA, 23 nt, Artificial Sequence
  Chemically synthesized
uuuucugauaaaagauggccaua

SEQ ID NO: 64390 - RNA, 23 nt, Artificial Sequence
  Chemically synthesized
uuuuucugauaaaagauggccau

SEQ ID NO: 64391 - RNA, 23 nt, Artificial Sequence
  Chemically synthesized
caaaucagaagucaucuugcuac

SEQ ID NO: 64392 - RNA, 23 nt, Artificial Sequence
  Chemically synthesized
acaaaucagaagucaucuugcua

SEQ ID NO: 64393 - RNA, 23 nt, Artificial Sequence
  Chemically synthesized
uacaaaucagaagucaucuugcu

SEQ ID NO: 64394 - RNA, 23 nt, Artificial Sequence
  Chemically synthesized
uuacaaaucagaagucaucuugc

SEQ ID NO: 64395 - RNA, 23 nt, Artificial Sequence
  Chemically synthesized
auuacaaaucagaagucaucuug

SEQ ID NO: 64396 - RNA, 23 nt, Artificial Sequence
  Chemically synthesized
caagcacagcccuuaugcgguua

SEQ ID NO: 64397 - RNA, 23 nt, Artificial Sequence
  Chemically synthesized
agcaaagaccaaagauggaguga

SEQ ID NO: 64398 - RNA, 23 nt, Artificial Sequence
  Chemically synthesized
cagcaaagaccaaagauggagug

SEQ ID NO: 64399 - RNA, 23 nt, Artificial Sequence
  Chemically synthesized
ucagcaaagaccaaagauggagu

SEQ ID NO: 64400 - RNA, 23 nt, Artificial Sequence
  Chemically synthesized
uucagcaaagaccaaagauggag

SEQ ID NO: 64401 - RNA, 23 nt, Artificial Sequence
  Chemically synthesized
gaauugguuucacgccugaggca

SEQ ID NO: 64402 - RNA, 23 nt, Artificial Sequence
  Chemically synthesized
uuacuccguaacagauuuuguug

SEQ ID NO: 64403 - RNA, 23 nt, Artificial Sequence
  Chemically synthesized
uuuacuccguaacagauuuuguu

SEQ ID NO: 64404 - RNA, 23 nt, Artificial Sequence
  Chemically synthesized
cuuuacuccguaacagauuuugu

SEQ ID NO: 64405 - RNA, 23 nt, Artificial Sequence
  Chemically synthesized
gcuuuacuccguaacagauuuug

SEQ ID NO: 64406 - RNA, 23 nt, Artificial Sequence
  Chemically synthesized
ggcuuuacuccguaacagauuuu

SEQ ID NO: 64407 - RNA, 23 nt, Artificial Sequence
  Chemically synthesized
cgcuaauucaaggaauuucuuaa

SEQ ID NO: 64408 - RNA, 23 nt, Artificial Sequence
  Chemically synthesized
gcgcuaauucaaggaauuucuua

SEQ ID NO: 64409 - RNA, 23 nt, Artificial Sequence
  Chemically synthesized
ugacacaccaggcgcuaauucaa

SEQ ID NO: 64410 - RNA, 23 nt, Artificial Sequence
  Chemically synthesized
cugacacaccaggcgcuaauuca

SEQ ID NO: 64411 - RNA, 23 nt, Artificial Sequence
  Chemically synthesized
ccugacacaccaggcgcuaauuc

SEQ ID NO: 64412 - RNA, 23 nt, Artificial Sequence
  Chemically synthesized
accugacacaccaggcgcuaauu

SEQ ID NO: 64413 - RNA, 23 nt, Artificial Sequence
  Chemically synthesized
caccugacacaccaggcgcuaau

SEQ ID NO: 64414 - RNA, 23 nt, Artificial Sequence
  Chemically synthesized
gauuacaaaucagaagucaucuu

SEQ ID NO: 64415 - RNA, 23 nt, Artificial Sequence
  Chemically synthesized
uuucuccucacuguauccagguu

SEQ ID NO: 64416 - RNA, 23 nt, Artificial Sequence
  Chemically synthesized
cuuaagcaucuggcucuaauuca

SEQ ID NO: 64417 - RNA, 23 nt, Artificial Sequence
  Chemically synthesized
acuuaagcaucuggcucuaauuc

SEQ ID NO: 64418 - RNA, 23 nt, Artificial Sequence
  Chemically synthesized
gacuuaagcaucuggcucuaauu

SEQ ID NO: 64419 - RNA, 23 nt, Artificial Sequence
  Chemically synthesized
ggacuuaagcaucuggcucuaau

SEQ ID NO: 64420 - RNA, 23 nt, Artificial Sequence
  Chemically synthesized
aaauucccguuuugucacuuuuu

SEQ ID NO: 64421 - RNA, 23 nt, Artificial Sequence
  Chemically synthesized
ucuugcuucuuucuagaaagaga

SEQ ID NO: 64422 - RNA, 23 nt, Artificial Sequence
  Chemically synthesized
acacugcucuaacagcccuccuc

SEQ ID NO: 64423 - RNA, 23 nt, Artificial Sequence
  Chemically synthesized
gacacugcucuaacagcccuccu

SEQ ID NO: 64424 - RNA, 23 nt, Artificial Sequence
  Chemically synthesized
ugacacugcucuaacagcccucc

SEQ ID NO: 64425 - RNA, 23 nt, Artificial Sequence
  Chemically synthesized
uugacacugcucuaacagcccuc

SEQ ID NO: 64426 - RNA, 23 nt, Artificial Sequence
  Chemically synthesized
uuugacacugcucuaacagcccu

SEQ ID NO: 64427 - RNA, 23 nt, Artificial Sequence
  Chemically synthesized
ggauucguugccugagcaauggc

SEQ ID NO: 64428 - RNA, 23 nt, Artificial Sequence
  Chemically synthesized
cggauucguugccugagcaaugg

SEQ ID NO: 64429 - RNA, 23 nt, Artificial Sequence
  Chemically synthesized
ucggauucguugccugagcaaug

SEQ ID NO: 64430 - RNA, 23 nt, Artificial Sequence
  Chemically synthesized
cucggauucguugccugagcaau

SEQ ID NO: 64431 - RNA, 23 nt, Artificial Sequence
  Chemically synthesized
acucggauucguugccugagcaa

SEQ ID NO: 64432 - RNA, 23 nt, Artificial Sequence
  Chemically synthesized
uccuccgucgguucucucguuag

SEQ ID NO: 64433 - RNA, 23 nt, Artificial Sequence
  Chemically synthesized
guccuccgucgguucucucguua

SEQ ID NO: 64434 - RNA, 23 nt, Artificial Sequence
  Chemically synthesized
uggcucuaauucacagugcucuu

SEQ ID NO: 64435 - RNA, 23 nt, Artificial Sequence
  Chemically synthesized
cuggcucuaauucacagugcucu

SEQ ID NO: 64436 - RNA, 23 nt, Artificial Sequence
  Chemically synthesized
gaagauggcauaaccugucucac

SEQ ID NO: 64437 - RNA, 23 nt, Artificial Sequence
  Chemically synthesized
ggaagauggcauaaccugucuca

SEQ ID NO: 64438 - RNA, 23 nt, Artificial Sequence
  Chemically synthesized
uggaagauggcauaaccugucuc

SEQ ID NO: 64439 - RNA, 23 nt, Artificial Sequence
  Chemically synthesized
uuggaagauggcauaaccugucu

SEQ ID NO: 64440 - RNA, 23 nt, Artificial Sequence
  Chemically synthesized
uuuggaagauggcauaaccuguc

SEQ ID NO: 64441 - RNA, 23 nt, Artificial Sequence
  Chemically synthesized
cuuuggaagauggcauaaccugu

SEQ ID NO: 64442 - RNA, 23 nt, Artificial Sequence
  Chemically synthesized
uaaauucccguuuugucacuuuu

SEQ ID NO: 64443 - RNA, 23 nt, Artificial Sequence
  Chemically synthesized
ugcagcuguggcagaguuacagu

SEQ ID NO: 64444 - RNA, 23 nt, Artificial Sequence
  Chemically synthesized
augcagcuguggcagaguuacag

SEQ ID NO: 64445 - RNA, 23 nt, Artificial Sequence
  Chemically synthesized
caugcagcuguggcagaguuaca

SEQ ID NO: 64446 - RNA, 23 nt, Artificial Sequence
  Chemically synthesized
ucaugcagcuguggcagaguuac

SEQ ID NO: 64447 - RNA, 23 nt, Artificial Sequence
  Chemically synthesized
uucaugcagcuguggcagaguua

SEQ ID NO: 64448 - RNA, 23 nt, Artificial Sequence
  Chemically synthesized
uccguaacagauuuuguuggcau

SEQ ID NO: 64449 - RNA, 23 nt, Artificial Sequence
  Chemically synthesized
cuccguaacagauuuuguuggca

SEQ ID NO: 64450 - RNA, 23 nt, Artificial Sequence
  Chemically synthesized
cuaacauguccugccuauuaucu

SEQ ID NO: 64451 - RNA, 23 nt, Artificial Sequence
  Chemically synthesized
acuaacauguccugccuauuauc

SEQ ID NO: 64452 - RNA, 23 nt, Artificial Sequence
  Chemically synthesized
aacuaacauguccugccuauuau

SEQ ID NO: 64453 - RNA, 23 nt, Artificial Sequence
  Chemically synthesized
uaacuaacauguccugccuauua

SEQ ID NO: 64454 - RNA, 23 nt, Artificial Sequence
  Chemically synthesized
gcuaauucaaggaauuucuuaac

SEQ ID NO: 64455 - RNA, 23 nt, Artificial Sequence
  Chemically synthesized
cccuuaugcgguuaauuuugaag

SEQ ID NO: 64456 - RNA, 23 nt, Artificial Sequence
  Chemically synthesized
ggaauaagaaggaucuucggaau

SEQ ID NO: 64457 - RNA, 23 nt, Artificial Sequence
  Chemically synthesized
gggaauaagaaggaucuucggaa

SEQ ID NO: 64458 - RNA, 23 nt, Artificial Sequence
  Chemically synthesized
ugggaauaagaaggaucuucgga

SEQ ID NO: 64459 - RNA, 23 nt, Artificial Sequence
  Chemically synthesized
uugggaauaagaaggaucuucgg

SEQ ID NO: 64460 - RNA, 23 nt, Artificial Sequence
  Chemically synthesized
guugggaauaagaaggaucuucg

SEQ ID NO: 64461 - RNA, 23 nt, Artificial Sequence
  Chemically synthesized
uagaaaacaucccagaaaagugg

SEQ ID NO: 64462 - RNA, 23 nt, Artificial Sequence
  Chemically synthesized
uuagaaaacaucccagaaaagug

SEQ ID NO: 64463 - RNA, 23 nt, Artificial Sequence
  Chemically synthesized
ucuggcucuaauucacagugcuc

SEQ ID NO: 64464 - RNA, 23 nt, Artificial Sequence
  Chemically synthesized
aucuggcucuaauucacagugcu

SEQ ID NO: 64465 - RNA, 23 nt, Artificial Sequence
  Chemically synthesized
caucuggcucuaauucacagugc

SEQ ID NO: 64466 - RNA, 23 nt, Artificial Sequence
  Chemically synthesized
ucacgccugaggcaauuagacac

SEQ ID NO: 64467 - RNA, 23 nt, Artificial Sequence
  Chemically synthesized
uucacgccugaggcaauuagaca

SEQ ID NO: 64468 - RNA, 23 nt, Artificial Sequence
  Chemically synthesized
uuucacgccugaggcaauuagac

SEQ ID NO: 64469 - RNA, 23 nt, Artificial Sequence
  Chemically synthesized
guuucacgccugaggcaauuaga

SEQ ID NO: 64470 - RNA, 23 nt, Artificial Sequence
  Chemically synthesized
gguuucacgccugaggcaauuag

SEQ ID NO: 64471 - RNA, 23 nt, Artificial Sequence
  Chemically synthesized
ccguuuugucacuuuuucugaua

SEQ ID NO: 64472 - RNA, 23 nt, Artificial Sequence
  Chemically synthesized
aaaaugggcucaaccagaaaagc

SEQ ID NO: 64473 - RNA, 23 nt, Artificial Sequence
  Chemically synthesized
gaaaaugggcucaaccagaaaag

SEQ ID NO: 64474 - RNA, 23 nt, Artificial Sequence
  Chemically synthesized
ugaaaaugggcucaaccagaaaa

SEQ ID NO: 64475 - RNA, 23 nt, Artificial Sequence
  Chemically synthesized
uugaaaaugggcucaaccagaaa

SEQ ID NO: 64476 - RNA, 23 nt, Artificial Sequence
  Chemically synthesized
uuugaaaaugggcucaaccagaa

SEQ ID NO: 64477 - RNA, 23 nt, Artificial Sequence
  Chemically synthesized
cuucagggcuuuacuccguaaca

SEQ ID NO: 64478 - RNA, 23 nt, Artificial Sequence
  Chemically synthesized
acuucagggcuuuacuccguaac

SEQ ID NO: 64479 - RNA, 23 nt, Artificial Sequence
  Chemically synthesized
gaaauggcuacgagagcugcucu

SEQ ID NO: 64480 - RNA, 23 nt, Artificial Sequence
  Chemically synthesized
ugaaauggcuacgagagcugcuc

SEQ ID NO: 64481 - RNA, 23 nt, Artificial Sequence
  Chemically synthesized
uugaaauggcuacgagagcugcu

SEQ ID NO: 64482 - RNA, 23 nt, Artificial Sequence
  Chemically synthesized
uuugaaauggcuacgagagcugc

SEQ ID NO: 64483 - RNA, 23 nt, Artificial Sequence
  Chemically synthesized
uuuugaaauggcuacgagagcug

SEQ ID NO: 64484 - RNA, 23 nt, Artificial Sequence
  Chemically synthesized
ccggugaaaccugaagaaggcag

SEQ ID NO: 64485 - RNA, 23 nt, Artificial Sequence
  Chemically synthesized
caggagccggugaaaccugaaga

SEQ ID NO: 64486 - RNA, 23 nt, Artificial Sequence
  Chemically synthesized
aauaagaaggaucuucggaauga

SEQ ID NO: 64487 - RNA, 23 nt, Artificial Sequence
  Chemically synthesized
gaauaagaaggaucuucggaaug

SEQ ID NO: 64488 - RNA, 23 nt, Artificial Sequence
  Chemically synthesized
gcauuucugucccaacgugccca

SEQ ID NO: 64489 - RNA, 23 nt, Artificial Sequence
  Chemically synthesized
agcauuucugucccaacgugccc

SEQ ID NO: 64490 - RNA, 23 nt, Artificial Sequence
  Chemically synthesized
aagcauuucugucccaacgugcc

SEQ ID NO: 64491 - RNA, 23 nt, Artificial Sequence
  Chemically synthesized
caagcauuucugucccaacgugc

SEQ ID NO: 64492 - RNA, 23 nt, Artificial Sequence
  Chemically synthesized
ucaagcauuucugucccaacgug

SEQ ID NO: 64493 - RNA, 23 nt, Artificial Sequence
  Chemically synthesized
acggucuggucuucagcuacccg

SEQ ID NO: 64494 - RNA, 23 nt, Artificial Sequence
  Chemically synthesized
cacggucuggucuucagcuaccc

SEQ ID NO: 64495 - RNA, 23 nt, Artificial Sequence
  Chemically synthesized
ccacggucuggucuucagcuacc

SEQ ID NO: 64496 - RNA, 23 nt, Artificial Sequence
  Chemically synthesized
uccacggucuggucuucagcuac

SEQ ID NO: 64497 - RNA, 23 nt, Artificial Sequence
  Chemically synthesized
guccacggucuggucuucagcua

SEQ ID NO: 64498 - RNA, 23 nt, Artificial Sequence
  Chemically synthesized
uggacuuaagcaucuggcucuaa

SEQ ID NO: 64499 - RNA, 23 nt, Artificial Sequence
  Chemically synthesized
cuggacuuaagcaucuggcucua

SEQ ID NO: 64500 - RNA, 23 nt, Artificial Sequence
  Chemically synthesized
accuggacuuaagcaucuggcuc

SEQ ID NO: 64501 - RNA, 23 nt, Artificial Sequence
  Chemically synthesized
caccuggacuuaagcaucuggcu

SEQ ID NO: 64502 - RNA, 23 nt, Artificial Sequence
  Chemically synthesized
ucaccuggacuuaagcaucuggc

SEQ ID NO: 64503 - RNA, 23 nt, Artificial Sequence
  Chemically synthesized
cucaccuggacuuaagcaucugg

SEQ ID NO: 64504 - RNA, 23 nt, Artificial Sequence
  Chemically synthesized
ucucaccuggacuuaagcaucug

SEQ ID NO: 64505 - RNA, 23 nt, Artificial Sequence
  Chemically synthesized
gucucaccuggacuuaagcaucu

SEQ ID NO: 64506 - RNA, 23 nt, Artificial Sequence
  Chemically synthesized
ugucucaccuggacuuaagcauc

SEQ ID NO: 64507 - RNA, 23 nt, Artificial Sequence
  Chemically synthesized
cugucucaccuggacuuaagcau

SEQ ID NO: 64508 - RNA, 23 nt, Artificial Sequence
  Chemically synthesized
accugucucaccuggacuuaagc

SEQ ID NO: 64509 - RNA, 23 nt, Artificial Sequence
  Chemically synthesized
aaccugucucaccuggacuuaag

SEQ ID NO: 64510 - RNA, 23 nt, Artificial Sequence
  Chemically synthesized
uaaccugucucaccuggacuuaa

SEQ ID NO: 64511 - RNA, 23 nt, Artificial Sequence
  Chemically synthesized
auaaccugucucaccuggacuua

SEQ ID NO: 64512 - RNA, 23 nt, Artificial Sequence
  Chemically synthesized
cauaaccugucucaccuggacuu

SEQ ID NO: 64513 - RNA, 23 nt, Artificial Sequence
  Chemically synthesized
cauccucaaagaaaguguauugg

SEQ ID NO: 64514 - RNA, 23 nt, Artificial Sequence
  Chemically synthesized
ucauccucaaagaaaguguauug

SEQ ID NO: 64515 - RNA, 23 nt, Artificial Sequence
  Chemically synthesized
gucauccucaaagaaaguguauu

SEQ ID NO: 64516 - RNA, 23 nt, Artificial Sequence
  Chemically synthesized
cucaaccagaaaagcccaaguuc

SEQ ID NO: 64517 - RNA, 23 nt, Artificial Sequence
  Chemically synthesized
gcucaaccagaaaagcccaaguu

SEQ ID NO: 64518 - RNA, 23 nt, Artificial Sequence
  Chemically synthesized
acuccguaacagauuuuguuggc

SEQ ID NO: 64519 - RNA, 23 nt, Artificial Sequence
  Chemically synthesized
uacuccguaacagauuuuguugg

SEQ ID NO: 64520 - RNA, 23 nt, Artificial Sequence
  Chemically synthesized
cacuucagggcuuuacuccguaa

SEQ ID NO: 64521 - RNA, 23 nt, Artificial Sequence
  Chemically synthesized
gugaaaccugaagaaggcagaga

SEQ ID NO: 64522 - RNA, 23 nt, Artificial Sequence
  Chemically synthesized
ggugaaaccugaagaaggcagag

SEQ ID NO: 64523 - RNA, 23 nt, Artificial Sequence
  Chemically synthesized
cggugaaaccugaagaaggcaga

SEQ ID NO: 64524 - RNA, 23 nt, Artificial Sequence
  Chemically synthesized
gucaagcauuucugucccaacgu

SEQ ID NO: 64525 - RNA, 23 nt, Artificial Sequence
  Chemically synthesized
agucaagcauuucugucccaacg

SEQ ID NO: 64526 - RNA, 23 nt, Artificial Sequence
  Chemically synthesized
aagucaagcauuucugucccaac

SEQ ID NO: 64527 - RNA, 23 nt, Artificial Sequence
  Chemically synthesized
gaagucaagcauuucugucccaa

SEQ ID NO: 64528 - RNA, 23 nt, Artificial Sequence
  Chemically synthesized
cuuuuuuucuguaccaguuaauu

SEQ ID NO: 64529 - RNA, 23 nt, Artificial Sequence
  Chemically synthesized
acuuuuuuucuguaccaguuaau

SEQ ID NO: 64530 - RNA, 23 nt, Artificial Sequence
  Chemically synthesized
aacuuuuuuucuguaccaguuaa

SEQ ID NO: 64531 - RNA, 23 nt, Artificial Sequence
  Chemically synthesized
aaacuuuuuuucuguaccaguua

SEQ ID NO: 64532 - RNA, 23 nt, Artificial Sequence
  Chemically synthesized
uaaacuuuuuuucuguaccaguu

SEQ ID NO: 64533 - RNA, 23 nt, Artificial Sequence
  Chemically synthesized
ccugucucaccuggacuuaagca

SEQ ID NO: 64534 - RNA, 23 nt, Artificial Sequence
  Chemically synthesized
agauggcauaaccugucucaccu

SEQ ID NO: 64535 - RNA, 23 nt, Artificial Sequence
  Chemically synthesized
aagauggcauaaccugucucacc

SEQ ID NO: 64536 - RNA, 23 nt, Artificial Sequence
  Chemically synthesized
aaauaggaauugguuucacgccu

SEQ ID NO: 64537 - RNA, 23 nt, Artificial Sequence
  Chemically synthesized
gucaccacuucagggcuuuacuc

SEQ ID NO: 64538 - RNA, 23 nt, Artificial Sequence
  Chemically synthesized
agucaccacuucagggcuuuacu

SEQ ID NO: 64539 - RNA, 23 nt, Artificial Sequence
  Chemically synthesized
gagucaccacuucagggcuuuac

SEQ ID NO: 64540 - RNA, 23 nt, Artificial Sequence
  Chemically synthesized
ugagucaccacuucagggcuuua

SEQ ID NO: 64541 - RNA, 23 nt, Artificial Sequence
  Chemically synthesized
gugagucaccacuucagggcuuu

SEQ ID NO: 64542 - RNA, 23 nt, Artificial Sequence
  Chemically synthesized
aacauguccugccuauuaucugu

SEQ ID NO: 64543 - RNA, 23 nt, Artificial Sequence
  Chemically synthesized
uaacauguccugccuauuaucug

SEQ ID NO: 64544 - RNA, 23 nt, Artificial Sequence
  Chemically synthesized
aaucagaagucaucuugcuacca

SEQ ID NO: 64545 - RNA, 23 nt, Artificial Sequence
  Chemically synthesized
aaaucagaagucaucuugcuacc

SEQ ID NO: 64546 - RNA, 23 nt, Artificial Sequence
  Chemically synthesized
gugauggagccuguggaaagaca

SEQ ID NO: 64547 - RNA, 23 nt, Artificial Sequence
  Chemically synthesized
ugcaagcacagcccuuaugcggu

SEQ ID NO: 64548 - RNA, 23 nt, Artificial Sequence
  Chemically synthesized
cugcaagcacagcccuuaugcgg

SEQ ID NO: 64549 - RNA, 23 nt, Artificial Sequence
  Chemically synthesized
gcugcaagcacagcccuuaugcg

SEQ ID NO: 64550 - RNA, 23 nt, Artificial Sequence
  Chemically synthesized
ugcugcaagcacagcccuuaugc

SEQ ID NO: 64551 - RNA, 23 nt, Artificial Sequence
  Chemically synthesized
uugcugcaagcacagcccuuaug

SEQ ID NO: 64552 - RNA, 23 nt, Artificial Sequence
  Chemically synthesized
guucagcaaagaccaaagaugga

SEQ ID NO: 64553 - RNA, 23 nt, Artificial Sequence
  Chemically synthesized
uguucagcaaagaccaaagaugg

SEQ ID NO: 64554 - RNA, 23 nt, Artificial Sequence
  Chemically synthesized
gccauccggaagaaacuggugau

SEQ ID NO: 64555 - RNA, 23 nt, Artificial Sequence
  Chemically synthesized
agguguaugugcccacaguguuu

SEQ ID NO: 64556 - RNA, 23 nt, Artificial Sequence
  Chemically synthesized
gagguguaugugcccacaguguu

SEQ ID NO: 64557 - RNA, 23 nt, Artificial Sequence
  Chemically synthesized
agagguguaugugcccacagugu

SEQ ID NO: 64558 - RNA, 23 nt, Artificial Sequence
  Chemically synthesized
cagagguguaugugcccacagug

SEQ ID NO: 64559 - RNA, 23 nt, Artificial Sequence
  Chemically synthesized
ccagagguguaugugcccacagu

SEQ ID NO: 64560 - RNA, 23 nt, Artificial Sequence
  Chemically synthesized
cagcuguggcagaguuacaguuc

SEQ ID NO: 64561 - RNA, 23 nt, Artificial Sequence
  Chemically synthesized
gcagcuguggcagaguuacaguu

SEQ ID NO: 64562 - RNA, 23 nt, Artificial Sequence
  Chemically synthesized
aaaagcccaaguucaugcagcug

SEQ ID NO: 64563 - RNA, 23 nt, Artificial Sequence
  Chemically synthesized
gaaaagcccaaguucaugcagcu

SEQ ID NO: 64564 - RNA, 23 nt, Artificial Sequence
  Chemically synthesized
ucaccacuucagggcuuuacucc

SEQ ID NO: 64565 - RNA, 23 nt, Artificial Sequence
  Chemically synthesized
uucuugcuucuuucuagaaagag

SEQ ID NO: 64566 - RNA, 23 nt, Artificial Sequence
  Chemically synthesized
cuucuugcuucuuucuagaaaga

SEQ ID NO: 64567 - RNA, 23 nt, Artificial Sequence
  Chemically synthesized
acuucuugcuucuuucuagaaag

SEQ ID NO: 64568 - RNA, 23 nt, Artificial Sequence
  Chemically synthesized
aacuucuugcuucuuucuagaaa

SEQ ID NO: 64569 - RNA, 23 nt, Artificial Sequence
  Chemically synthesized
cuugcugcaagcacagcccuuau

SEQ ID NO: 64570 - RNA, 23 nt, Artificial Sequence
  Chemically synthesized
ucucuccagcugacuaaacuuuu

SEQ ID NO: 64571 - RNA, 23 nt, Artificial Sequence
  Chemically synthesized
uucucuccagcugacuaaacuuu

SEQ ID NO: 64572 - RNA, 23 nt, Artificial Sequence
  Chemically synthesized
ucuucucuccagcugacuaaacu

SEQ ID NO: 64573 - RNA, 23 nt, Artificial Sequence
  Chemically synthesized
uaauuggauuuccuaauacuguc

SEQ ID NO: 64574 - RNA, 23 nt, Artificial Sequence
  Chemically synthesized
ugccauccggaagaaacugguga

SEQ ID NO: 64575 - RNA, 23 nt, Artificial Sequence
  Chemically synthesized
cugccauccggaagaaacuggug

SEQ ID NO: 64576 - RNA, 23 nt, Artificial Sequence
  Chemically synthesized
gcugccauccggaagaaacuggu

SEQ ID NO: 64577 - RNA, 23 nt, Artificial Sequence
  Chemically synthesized
ugucauccucaaagaaaguguau

SEQ ID NO: 64578 - RNA, 23 nt, Artificial Sequence
  Chemically synthesized
ggugagucaccacuucagggcuu

SEQ ID NO: 64579 - RNA, 23 nt, Artificial Sequence
  Chemically synthesized
gcaagguacucuggugagucacc

SEQ ID NO: 64580 - RNA, 23 nt, Artificial Sequence
  Chemically synthesized
ugcaagguacucuggugagucac

SEQ ID NO: 64581 - RNA, 23 nt, Artificial Sequence
  Chemically synthesized
uuuuugaaauggcuacgagagcu

SEQ ID NO: 64582 - RNA, 23 nt, Artificial Sequence
  Chemically synthesized
cauccugguugggaauaagaagg

SEQ ID NO: 64583 - RNA, 23 nt, Artificial Sequence
  Chemically synthesized
ugauguguuuuuccaucgacagc

SEQ ID NO: 64584 - RNA, 23 nt, Artificial Sequence
  Chemically synthesized
cugauguguuuuuccaucgacag

SEQ ID NO: 64585 - RNA, 23 nt, Artificial Sequence
  Chemically synthesized
acugauguguuuuuccaucgaca

SEQ ID NO: 64586 - RNA, 23 nt, Artificial Sequence
  Chemically synthesized
uacugauguguuuuuccaucgac

SEQ ID NO: 64587 - RNA, 23 nt, Artificial Sequence
  Chemically synthesized
auacugauguguuuuuccaucga

SEQ ID NO: 64588 - RNA, 23 nt, Artificial Sequence
  Chemically synthesized
ccucuccuacccagauaccgaug

SEQ ID NO: 64589 - RNA, 23 nt, Artificial Sequence
  Chemically synthesized
cccucuccuacccagauaccgau

SEQ ID NO: 64590 - RNA, 23 nt, Artificial Sequence
  Chemically synthesized
ccuggacuuaagcaucuggcucu

SEQ ID NO: 64591 - RNA, 23 nt, Artificial Sequence
  Chemically synthesized
cguuuugucacuuuuucugauaa

SEQ ID NO: 64592 - RNA, 23 nt, Artificial Sequence
  Chemically synthesized
ccacuucagggcuuuacuccgua

SEQ ID NO: 64593 - RNA, 23 nt, Artificial Sequence
  Chemically synthesized
accacuucagggcuuuacuccgu

SEQ ID NO: 64594 - RNA, 23 nt, Artificial Sequence
  Chemically synthesized
caccacuucagggcuuuacuccg

SEQ ID NO: 64595 - RNA, 23 nt, Artificial Sequence
  Chemically synthesized
cucuggugagucaccacuucagg

SEQ ID NO: 64596 - RNA, 23 nt, Artificial Sequence
  Chemically synthesized
acucuggugagucaccacuucag

SEQ ID NO: 64597 - RNA, 23 nt, Artificial Sequence
  Chemically synthesized
uacucuggugagucaccacuuca

SEQ ID NO: 64598 - RNA, 23 nt, Artificial Sequence
  Chemically synthesized
guacucuggugagucaccacuuc

SEQ ID NO: 64599 - RNA, 23 nt, Artificial Sequence
  Chemically synthesized
gguacucuggugagucaccacuu

SEQ ID NO: 64600 - RNA, 23 nt, Artificial Sequence
  Chemically synthesized
gcuacgagagcugcucugcaagc

SEQ ID NO: 64601 - RNA, 23 nt, Artificial Sequence
  Chemically synthesized
ggcuacgagagcugcucugcaag

SEQ ID NO: 64602 - RNA, 23 nt, Artificial Sequence
  Chemically synthesized
uggcuacgagagcugcucugcaa

SEQ ID NO: 64603 - RNA, 23 nt, Artificial Sequence
  Chemically synthesized
guaugugcccacaguguuugaga

SEQ ID NO: 64604 - RNA, 23 nt, Artificial Sequence
  Chemically synthesized
uguaugugcccacaguguuugag

SEQ ID NO: 64605 - RNA, 23 nt, Artificial Sequence
  Chemically synthesized
guguaugugcccacaguguuuga

SEQ ID NO: 64606 - RNA, 23 nt, Artificial Sequence
  Chemically synthesized
gguguaugugcccacaguguuug

SEQ ID NO: 64607 - RNA, 23 nt, Artificial Sequence
  Chemically synthesized
gacacaccaggcgcuaauucaag

SEQ ID NO: 64608 - RNA, 23 nt, Artificial Sequence
  Chemically synthesized
cccagagguguaugugcccacag

SEQ ID NO: 64609 - RNA, 23 nt, Artificial Sequence
  Chemically synthesized
ucccagagguguaugugcccaca

SEQ ID NO: 64610 - RNA, 23 nt, Artificial Sequence
  Chemically synthesized
acacaccaggcgcuaauucaagg

SEQ ID NO: 64611 - RNA, 23 nt, Artificial Sequence
  Chemically synthesized
agcuagccaagaugaagcaggag

SEQ ID NO: 64612 - RNA, 23 nt, Artificial Sequence
  Chemically synthesized
gagcuagccaagaugaagcagga

SEQ ID NO: 64613 - RNA, 23 nt, Artificial Sequence
  Chemically synthesized
gauguguuuuuccaucgacagcc

SEQ ID NO: 64614 - RNA, 23 nt, Artificial Sequence
  Chemically synthesized
cucuucucuccagcugacuaaac

SEQ ID NO: 64615 - RNA, 23 nt, Artificial Sequence
  Chemically synthesized
ucucuucucuccagcugacuaaa

SEQ ID NO: 64616 - RNA, 23 nt, Artificial Sequence
  Chemically synthesized
cucucuucucuccagcugacuaa

SEQ ID NO: 64617 - RNA, 23 nt, Artificial Sequence
  Chemically synthesized
agguacucuggugagucaccacu

SEQ ID NO: 64618 - RNA, 23 nt, Artificial Sequence
  Chemically synthesized
aagguacucuggugagucaccac

SEQ ID NO: 64619 - RNA, 23 nt, Artificial Sequence
  Chemically synthesized
caagguacucuggugagucacca

SEQ ID NO: 64620 - RNA, 23 nt, Artificial Sequence
  Chemically synthesized
gucagcugcaagguacucuggug

SEQ ID NO: 64621 - RNA, 23 nt, Artificial Sequence
  Chemically synthesized
ugucagcugcaagguacucuggu

SEQ ID NO: 64622 - RNA, 23 nt, Artificial Sequence
  Chemically synthesized
cugucagcugcaagguacucugg

SEQ ID NO: 64623 - RNA, 23 nt, Artificial Sequence
  Chemically synthesized
ucugucagcugcaagguacucug

SEQ ID NO: 64624 - RNA, 23 nt, Artificial Sequence
  Chemically synthesized
ggcucaaccagaaaagcccaagu

SEQ ID NO: 64625 - RNA, 23 nt, Artificial Sequence
  Chemically synthesized
uggugagucaccacuucagggcu

SEQ ID NO: 64626 - RNA, 23 nt, Artificial Sequence
  Chemically synthesized
cuggugagucaccacuucagggc

SEQ ID NO: 64627 - RNA, 23 nt, Artificial Sequence
  Chemically synthesized
ucuggugagucaccacuucaggg

SEQ ID NO: 64628 - RNA, 23 nt, Artificial Sequence
  Chemically synthesized
agaaaacaucccagaaaagugga

SEQ ID NO: 64629 - RNA, 23 nt, Artificial Sequence
  Chemically synthesized
gggcucaaccagaaaagcccaag

SEQ ID NO: 64630 - RNA, 23 nt, Artificial Sequence
  Chemically synthesized
ugggcucaaccagaaaagcccaa

SEQ ID NO: 64631 - RNA, 23 nt, Artificial Sequence
  Chemically synthesized
guucaugcagcuguggcagaguu

SEQ ID NO: 64632 - RNA, 23 nt, Artificial Sequence
  Chemically synthesized
caacuaugauuauuaacgauguc

SEQ ID NO: 64633 - RNA, 23 nt, Artificial Sequence
  Chemically synthesized
gcagagauauggcaaacaggauu

SEQ ID NO: 64634 - RNA, 23 nt, Artificial Sequence
  Chemically synthesized
guguauuuggaaauaaagucaga

SEQ ID NO: 64635 - RNA, 23 nt, Artificial Sequence
  Chemically synthesized
cugcaagcuagacgugggaagaa

SEQ ID NO: 64636 - RNA, 23 nt, Artificial Sequence
  Chemically synthesized
guaauuagugccacuuaauguau

SEQ ID NO: 64637 - RNA, 23 nt, Artificial Sequence
  Chemically synthesized
ccuuauaguuacuguguaauuag

SEQ ID NO: 64638 - RNA, 23 nt, Artificial Sequence
  Chemically synthesized
ggcagagauauggcaaacaggau

SEQ ID NO: 64639 - RNA, 23 nt, Artificial Sequence
  Chemically synthesized
ccaacuacuaauagaauaaaggc

SEQ ID NO: 64640 - RNA, 23 nt, Artificial Sequence
  Chemically synthesized
gacuaaacuuuuuuucuguacca

SEQ ID NO: 64641 - RNA, 23 nt, Artificial Sequence
  Chemically synthesized
uuagugccacuuaauguauguua

SEQ ID NO: 64642 - RNA, 23 nt, Artificial Sequence
  Chemically synthesized
gguuuuugaaauggcuacgagag

SEQ ID NO: 64643 - RNA, 23 nt, Artificial Sequence
  Chemically synthesized
caacuacuaauagaauaaaggca

SEQ ID NO: 64644 - RNA, 23 nt, Artificial Sequence
  Chemically synthesized
cugacuaaacuuuuuuucuguac

SEQ ID NO: 64645 - RNA, 23 nt, Artificial Sequence
  Chemically synthesized
gaagaaggcagagauauggcaaa

SEQ ID NO: 64646 - RNA, 23 nt, Artificial Sequence
  Chemically synthesized
ugacuaaacuuuuuuucuguacc

SEQ ID NO: 64647 - RNA, 23 nt, Artificial Sequence
  Chemically synthesized
aggcagagauauggcaaacagga

SEQ ID NO: 64648 - RNA, 23 nt, Artificial Sequence
  Chemically synthesized
gaaggcagagauauggcaaacag

SEQ ID NO: 64649 - RNA, 23 nt, Artificial Sequence
  Chemically synthesized
agaaggcagagauauggcaaaca

SEQ ID NO: 64650 - RNA, 23 nt, Artificial Sequence
  Chemically synthesized
guguuuuuccaucgacagcccug

SEQ ID NO: 64651 - RNA, 23 nt, Artificial Sequence
  Chemically synthesized
uguuauacugauguguuuuucca

SEQ ID NO: 64652 - RNA, 23 nt, Artificial Sequence
  Chemically synthesized
ugguuucacgccugaggcaauua

SEQ ID NO: 64653 - RNA, 23 nt, Artificial Sequence
  Chemically synthesized
gaauuucuuaacuucuugcuucu

SEQ ID NO: 64654 - RNA, 23 nt, Artificial Sequence
  Chemically synthesized
cugaagaaggcagagauauggca

SEQ ID NO: 64655 - RNA, 23 nt, Artificial Sequence
  Chemically synthesized
agaugaagcaggagccggugaaa

SEQ ID NO: 64656 - RNA, 23 nt, Artificial Sequence
  Chemically synthesized
ggcagaguuacaguucugugguu

SEQ ID NO: 64657 - RNA, 23 nt, Artificial Sequence
  Chemically synthesized
gaaacuggugauuguuggugaug

SEQ ID NO: 64658 - RNA, 23 nt, Artificial Sequence
  Chemically synthesized
ucucucuucucuccagcugacua

SEQ ID NO: 64659 - RNA, 23 nt, Artificial Sequence
  Chemically synthesized
gaaagacaugcuugcucauaguc

SEQ ID NO: 64660 - RNA, 23 nt, Artificial Sequence
  Chemically synthesized
gaaaccugaagaaggcagagaua

SEQ ID NO: 64661 - RNA, 23 nt, Artificial Sequence
  Chemically synthesized
cuguguaauuagugccacuuaau

SEQ ID NO: 64662 - RNA, 23 nt, Artificial Sequence
  Chemically synthesized
caguuuuuugaaaaugggcucaa

SEQ ID NO: 64663 - RNA, 23 nt, Artificial Sequence
  Chemically synthesized
acuguguaauuagugccacuuaa

SEQ ID NO: 64664 - RNA, 23 nt, Artificial Sequence
  Chemically synthesized
gcagaguuacaguucugugguuu

SEQ ID NO: 64665 - RNA, 23 nt, Artificial Sequence
  Chemically synthesized
caauggcugccauccggaagaaa

SEQ ID NO: 64666 - RNA, 23 nt, Artificial Sequence
  Chemically synthesized
uacuguguaauuagugccacuua

SEQ ID NO: 64667 - RNA, 23 nt, Artificial Sequence
  Chemically synthesized
uuacuguguaauuagugccacuu

SEQ ID NO: 64668 - RNA, 23 nt, Artificial Sequence
  Chemically synthesized
cuugugaaaccuugcugcaagca

SEQ ID NO: 64669 - RNA, 23 nt, Artificial Sequence
  Chemically synthesized
aaaccugaagaaggcagagauau

SEQ ID NO: 64670 - RNA, 23 nt, Artificial Sequence
  Chemically synthesized
ugaaaccugaagaaggcagagau

SEQ ID NO: 64671 - RNA, 23 nt, Artificial Sequence
  Chemically synthesized
uuaaauucccguuuugucacuuu

SEQ ID NO: 64672 - RNA, 23 nt, Artificial Sequence
  Chemically synthesized
gacaugcuugcucauagucuuca

SEQ ID NO: 64673 - RNA, 23 nt, Artificial Sequence
  Chemically synthesized
uaacuucuugcuucuuucuagaa

SEQ ID NO: 64674 - RNA, 23 nt, Artificial Sequence
  Chemically synthesized
ccuuaugcgguuaauuuugaagu

SEQ ID NO: 64675 - RNA, 23 nt, Artificial Sequence
  Chemically synthesized
gugauuguuggugauggagccug

SEQ ID NO: 64676 - RNA, 23 nt, Artificial Sequence
  Chemically synthesized
gucacuuuuucugauaaaagaug

SEQ ID NO: 64677 - RNA, 23 nt, Artificial Sequence
  Chemically synthesized
cuaaacuuuuuuucuguaccagu

SEQ ID NO: 64678 - RNA, 23 nt, Artificial Sequence
  Chemically synthesized
uguguaauuagugccacuuaaug

SEQ ID NO: 64679 - RNA, 23 nt, Artificial Sequence
  Chemically synthesized
ugcucauagucuucagcaaggac

SEQ ID NO: 64680 - RNA, 23 nt, Artificial Sequence
  Chemically synthesized
ugcuugcucauagucuucagcaa

SEQ ID NO: 64681 - RNA, 23 nt, Artificial Sequence
  Chemically synthesized
uggaaagcagguagaguuggcuu

SEQ ID NO: 64682 - RNA, 23 nt, Artificial Sequence
  Chemically synthesized
cccauggagcugggcuaaguaaa

SEQ ID NO: 64683 - RNA, 23 nt, Artificial Sequence
  Chemically synthesized
guguaauuagugccacuuaaugu

SEQ ID NO: 64684 - RNA, 23 nt, Artificial Sequence
  Chemically synthesized
uguuaguuaccuuauaguuacug

SEQ ID NO: 64685 - RNA, 23 nt, Artificial Sequence
  Chemically synthesized
ucauagucuucagcaaggaccag

SEQ ID NO: 64686 - RNA, 23 nt, Artificial Sequence
  Chemically synthesized
ccuauuaucugucagcugcaagg

SEQ ID NO: 64687 - RNA, 23 nt, Artificial Sequence
  Chemically synthesized
guuggugauggagccuguggaaa

SEQ ID NO: 64688 - RNA, 23 nt, Artificial Sequence
  Chemically synthesized
caaguucaugcagcuguggcaga

SEQ ID NO: 64689 - RNA, 23 nt, Artificial Sequence
  Chemically synthesized
gaaaacaucccagaaaaguggac

SEQ ID NO: 64690 - RNA, 23 nt, Artificial Sequence
  Chemically synthesized
ucguuaguccacggucuggucuu

SEQ ID NO: 64691 - RNA, 23 nt, Artificial Sequence
  Chemically synthesized
uccaacuacuaauagaauaaagg

SEQ ID NO: 64692 - RNA, 23 nt, Artificial Sequence
  Chemically synthesized
uuccaacuacuaauagaauaaag

SEQ ID NO: 64693 - RNA, 23 nt, Artificial Sequence
  Chemically synthesized
uuuccaacuacuaauagaauaaa

SEQ ID NO: 64694 - RNA, 23 nt, Artificial Sequence
  Chemically synthesized
uuuuccaacuacuaauagaauaa

SEQ ID NO: 64695 - RNA, 23 nt, Artificial Sequence
  Chemically synthesized
ccuuuuucauuuaucuauaauuu

SEQ ID NO: 64696 - RNA, 23 nt, Artificial Sequence
  Chemically synthesized
gccuuuuucauuuaucuauaauu

SEQ ID NO: 64697 - RNA, 23 nt, Artificial Sequence
  Chemically synthesized
guguauugguuuuuuaaaaaaga

SEQ ID NO: 64698 - RNA, 23 nt, Artificial Sequence
  Chemically synthesized
aguguauugguuuuuuaaaaaag

SEQ ID NO: 64699 - RNA, 23 nt, Artificial Sequence
  Chemically synthesized
aaguguauugguuuuuuaaaaaa

SEQ ID NO: 64700 - RNA, 23 nt, Artificial Sequence
  Chemically synthesized
aaaguguauugguuuuuuaaaaa

SEQ ID NO: 64701 - RNA, 23 nt, Artificial Sequence
  Chemically synthesized
gaaaguguauugguuuuuuaaaa

SEQ ID NO: 64702 - RNA, 23 nt, Artificial Sequence
  Chemically synthesized
gauggaaaauucauuuuuuaaau

SEQ ID NO: 64703 - RNA, 23 nt, Artificial Sequence
  Chemically synthesized
cagauggaaaauucauuuuuuaa

SEQ ID NO: 64704 - RNA, 23 nt, Artificial Sequence
  Chemically synthesized
ucagauggaaaauucauuuuuua

SEQ ID NO: 64705 - RNA, 23 nt, Artificial Sequence
  Chemically synthesized
caguuaauuuuuccaacuacuaa

SEQ ID NO: 64706 - RNA, 23 nt, Artificial Sequence
  Chemically synthesized
cacauaguucucaaacacugugg

SEQ ID NO: 64707 - RNA, 23 nt, Artificial Sequence
  Chemically synthesized
acauaguucucaaacacuguggg

SEQ ID NO: 64708 - RNA, 23 nt, Artificial Sequence
  Chemically synthesized
cauaguucucaaacacugugggc

SEQ ID NO: 64709 - RNA, 23 nt, Artificial Sequence
  Chemically synthesized
auaguucucaaacacugugggca

SEQ ID NO: 64710 - RNA, 23 nt, Artificial Sequence
  Chemically synthesized
uaguucucaaacacugugggcac

SEQ ID NO: 64711 - RNA, 23 nt, Artificial Sequence
  Chemically synthesized
auuauagauaaaugaaaaaggcc

SEQ ID NO: 64712 - RNA, 23 nt, Artificial Sequence
  Chemically synthesized
uuauagauaaaugaaaaaggcca

SEQ ID NO: 64713 - RNA, 23 nt, Artificial Sequence
  Chemically synthesized
uauagauaaaugaaaaaggccag

SEQ ID NO: 64714 - RNA, 23 nt, Artificial Sequence
  Chemically synthesized
auagauaaaugaaaaaggccagu

SEQ ID NO: 64715 - RNA, 23 nt, Artificial Sequence
  Chemically synthesized
uagauaaaugaaaaaggccagua

SEQ ID NO: 64716 - RNA, 23 nt, Artificial Sequence
  Chemically synthesized
agcccauuuucaaaaaacugccc

SEQ ID NO: 64717 - RNA, 23 nt, Artificial Sequence
  Chemically synthesized
gcccauuuucaaaaaacugccca

SEQ ID NO: 64718 - RNA, 23 nt, Artificial Sequence
  Chemically synthesized
cccauuuucaaaaaacugcccac

SEQ ID NO: 64719 - RNA, 23 nt, Artificial Sequence
  Chemically synthesized
ccauuuucaaaaaacugcccacc

SEQ ID NO: 64720 - RNA, 23 nt, Artificial Sequence
  Chemically synthesized
cauuuucaaaaaacugcccaccc

SEQ ID NO: 64721 - RNA, 23 nt, Artificial Sequence
  Chemically synthesized
gcuguuagagcagugucaaaagg

SEQ ID NO: 64722 - RNA, 23 nt, Artificial Sequence
  Chemically synthesized
cuguuagagcagugucaaaagga

SEQ ID NO: 64723 - RNA, 23 nt, Artificial Sequence
  Chemically synthesized
uguuagagcagugucaaaaggac

SEQ ID NO: 64724 - RNA, 23 nt, Artificial Sequence
  Chemically synthesized
guuagagcagugucaaaaggacc

SEQ ID NO: 64725 - RNA, 23 nt, Artificial Sequence
  Chemically synthesized
uuagagcagugucaaaaggaccc

SEQ ID NO: 64726 - RNA, 23 nt, Artificial Sequence
  Chemically synthesized
agauaaaugaaaaaggccaguaa

SEQ ID NO: 64727 - RNA, 23 nt, Artificial Sequence
  Chemically synthesized
gauaaaugaaaaaggccaguaau

SEQ ID NO: 64728 - RNA, 23 nt, Artificial Sequence
  Chemically synthesized
auaaaugaaaaaggccaguaauc

SEQ ID NO: 64729 - RNA, 23 nt, Artificial Sequence
  Chemically synthesized
auuuucaaaaaacugcccacccc

SEQ ID NO: 64730 - RNA, 23 nt, Artificial Sequence
  Chemically synthesized
acaucguuaauaaucauaguugg

SEQ ID NO: 64731 - RNA, 23 nt, Artificial Sequence
  Chemically synthesized
caucguuaauaaucauaguuggc

SEQ ID NO: 64732 - RNA, 23 nt, Artificial Sequence
  Chemically synthesized
aucguuaauaaucauaguuggcu

SEQ ID NO: 64733 - RNA, 23 nt, Artificial Sequence
  Chemically synthesized
ucguuaauaaucauaguuggcuu

SEQ ID NO: 64734 - RNA, 23 nt, Artificial Sequence
  Chemically synthesized
cguuaauaaucauaguuggcuuc

SEQ ID NO: 64735 - RNA, 23 nt, Artificial Sequence
  Chemically synthesized
agccauuucaaaaaccucucuca

SEQ ID NO: 64736 - RNA, 23 nt, Artificial Sequence
  Chemically synthesized
gccauuucaaaaaccucucucac

SEQ ID NO: 64737 - RNA, 23 nt, Artificial Sequence
  Chemically synthesized
ccauuucaaaaaccucucucacu

SEQ ID NO: 64738 - RNA, 23 nt, Artificial Sequence
  Chemically synthesized
cauuucaaaaaccucucucacuc

SEQ ID NO: 64739 - RNA, 23 nt, Artificial Sequence
  Chemically synthesized
auuucaaaaaccucucucacucc

SEQ ID NO: 64740 - RNA, 23 nt, Artificial Sequence
  Chemically synthesized
aaccaauuccuauuuacuuagcc

SEQ ID NO: 64741 - RNA, 23 nt, Artificial Sequence
  Chemically synthesized
accaauuccuauuuacuuagccc

SEQ ID NO: 64742 - RNA, 23 nt, Artificial Sequence
  Chemically synthesized
ccaauuccuauuuacuuagccca

SEQ ID NO: 64743 - RNA, 23 nt, Artificial Sequence
  Chemically synthesized
caauuccuauuuacuuagcccag

SEQ ID NO: 64744 - RNA, 23 nt, Artificial Sequence
  Chemically synthesized
aauuccuauuuacuuagcccagc

SEQ ID NO: 64745 - RNA, 23 nt, Artificial Sequence
  Chemically synthesized
acuaugagcaagcaugucuuucc

SEQ ID NO: 64746 - RNA, 23 nt, Artificial Sequence
  Chemically synthesized
cuaugagcaagcaugucuuucca

SEQ ID NO: 64747 - RNA, 23 nt, Artificial Sequence
  Chemically synthesized
uaugagcaagcaugucuuuccac

SEQ ID NO: 64748 - RNA, 23 nt, Artificial Sequence
  Chemically synthesized
augagcaagcaugucuuuccaca

SEQ ID NO: 64749 - RNA, 23 nt, Artificial Sequence
  Chemically synthesized
ugagcaagcaugucuuuccacag

SEQ ID NO: 64750 - RNA, 23 nt, Artificial Sequence
  Chemically synthesized
gagcaagcaugucuuuccacagg

SEQ ID NO: 64751 - RNA, 23 nt, Artificial Sequence
  Chemically synthesized
agcaagcaugucuuuccacaggc

SEQ ID NO: 64752 - RNA, 23 nt, Artificial Sequence
  Chemically synthesized
gcaagcaugucuuuccacaggcu

SEQ ID NO: 64753 - RNA, 23 nt, Artificial Sequence
  Chemically synthesized
caagcaugucuuuccacaggcuc

SEQ ID NO: 64754 - RNA, 23 nt, Artificial Sequence
  Chemically synthesized
aagcaugucuuuccacaggcucc

SEQ ID NO: 64755 - RNA, 23 nt, Artificial Sequence
  Chemically synthesized
ggguuggacaucguuaauaauca

SEQ ID NO: 64756 - RNA, 23 nt, Artificial Sequence
  Chemically synthesized
gguuggacaucguuaauaaucau

SEQ ID NO: 64757 - RNA, 23 nt, Artificial Sequence
  Chemically synthesized
guuggacaucguuaauaaucaua

SEQ ID NO: 64758 - RNA, 23 nt, Artificial Sequence
  Chemically synthesized
uuggacaucguuaauaaucauag

SEQ ID NO: 64759 - RNA, 23 nt, Artificial Sequence
  Chemically synthesized
uggacaucguuaauaaucauagu

SEQ ID NO: 64760 - RNA, 23 nt, Artificial Sequence
  Chemically synthesized
guuaauaaucauaguuggcuucu

SEQ ID NO: 64761 - RNA, 23 nt, Artificial Sequence
  Chemically synthesized
uuaauaaucauaguuggcuucua

SEQ ID NO: 64762 - RNA, 23 nt, Artificial Sequence
  Chemically synthesized
uaauaaucauaguuggcuucuaa

SEQ ID NO: 64763 - RNA, 23 nt, Artificial Sequence
  Chemically synthesized
aauaaucauaguuggcuucuaaa

SEQ ID NO: 64764 - RNA, 23 nt, Artificial Sequence
  Chemically synthesized
gagaaaagagcacugugaauuag

SEQ ID NO: 64765 - RNA, 23 nt, Artificial Sequence
  Chemically synthesized
agaaaagagcacugugaauuaga

SEQ ID NO: 64766 - RNA, 23 nt, Artificial Sequence
  Chemically synthesized
gaaaagagcacugugaauuagag

SEQ ID NO: 64767 - RNA, 23 nt, Artificial Sequence
  Chemically synthesized
aaaagagcacugugaauuagagc

SEQ ID NO: 64768 - RNA, 23 nt, Artificial Sequence
  Chemically synthesized
aaagagcacugugaauuagagcc

SEQ ID NO: 64769 - RNA, 23 nt, Artificial Sequence
  Chemically synthesized
cugccacagcugcaugaacuugg

SEQ ID NO: 64770 - RNA, 23 nt, Artificial Sequence
  Chemically synthesized
ugccacagcugcaugaacuuggg

SEQ ID NO: 64771 - RNA, 23 nt, Artificial Sequence
  Chemically synthesized
gccacagcugcaugaacuugggc

SEQ ID NO: 64772 - RNA, 23 nt, Artificial Sequence
  Chemically synthesized
ccacagcugcaugaacuugggcu

SEQ ID NO: 64773 - RNA, 23 nt, Artificial Sequence
  Chemically synthesized
cacagcugcaugaacuugggcuu

SEQ ID NO: 64774 - RNA, 23 nt, Artificial Sequence
  Chemically synthesized
ugagcccauuuucaaaaaacugc

SEQ ID NO: 64775 - RNA, 23 nt, Artificial Sequence
  Chemically synthesized
gagcccauuuucaaaaaacugcc

SEQ ID NO: 64776 - RNA, 23 nt, Artificial Sequence
  Chemically synthesized
guuauaaaguaguuacagccuaa

SEQ ID NO: 64777 - RNA, 23 nt, Artificial Sequence
  Chemically synthesized
uaaaugaaaaaggccaguaauca

SEQ ID NO: 64778 - RNA, 23 nt, Artificial Sequence
  Chemically synthesized
ucaaaaaccucucucacuccauc

SEQ ID NO: 64779 - RNA, 23 nt, Artificial Sequence
  Chemically synthesized
caaaaaccucucucacuccaucu

SEQ ID NO: 64780 - RNA, 23 nt, Artificial Sequence
  Chemically synthesized
aaaaaccucucucacuccaucuu

SEQ ID NO: 64781 - RNA, 23 nt, Artificial Sequence
  Chemically synthesized
aacaaucaccaguuucuuccgga

SEQ ID NO: 64782 - RNA, 23 nt, Artificial Sequence
  Chemically synthesized
acaaucaccaguuucuuccggau

SEQ ID NO: 64783 - RNA, 23 nt, Artificial Sequence
  Chemically synthesized
caaucaccaguuucuuccggaug

SEQ ID NO: 64784 - RNA, 23 nt, Artificial Sequence
  Chemically synthesized
aaucaccaguuucuuccggaugg

SEQ ID NO: 64785 - RNA, 23 nt, Artificial Sequence
  Chemically synthesized
auacagugaggagaaaagagcac

SEQ ID NO: 64786 - RNA, 23 nt, Artificial Sequence
  Chemically synthesized
uacagugaggagaaaagagcacu

SEQ ID NO: 64787 - RNA, 23 nt, Artificial Sequence
  Chemically synthesized
acagugaggagaaaagagcacug

SEQ ID NO: 64788 - RNA, 23 nt, Artificial Sequence
  Chemically synthesized
cagugaggagaaaagagcacugu

SEQ ID NO: 64789 - RNA, 23 nt, Artificial Sequence
  Chemically synthesized
agugaggagaaaagagcacugug

SEQ ID NO: 64790 - RNA, 23 nt, Artificial Sequence
  Chemically synthesized
auuccuauuuacuuagcccagcu

SEQ ID NO: 64791 - RNA, 23 nt, Artificial Sequence
  Chemically synthesized
uuuucaaaaaacugcccacccca

SEQ ID NO: 64792 - RNA, 23 nt, Artificial Sequence
  Chemically synthesized
aagaaauuccuugaauuagcgcc

SEQ ID NO: 64793 - RNA, 23 nt, Artificial Sequence
  Chemically synthesized
agaaauuccuugaauuagcgccu

SEQ ID NO: 64794 - RNA, 23 nt, Artificial Sequence
  Chemically synthesized
gaaauuccuugaauuagcgccug

SEQ ID NO: 64795 - RNA, 23 nt, Artificial Sequence
  Chemically synthesized
aaauuccuugaauuagcgccugg

SEQ ID NO: 64796 - RNA, 23 nt, Artificial Sequence
  Chemically synthesized
aauuccuugaauuagcgccuggu

SEQ ID NO: 64797 - RNA, 23 nt, Artificial Sequence
  Chemically synthesized
aaaugaaaaaggccaguaaucau

SEQ ID NO: 64798 - RNA, 23 nt, Artificial Sequence
  Chemically synthesized
aagguuucacaagacaaggcacc

SEQ ID NO: 64799 - RNA, 23 nt, Artificial Sequence
  Chemically synthesized
agguuucacaagacaaggcaccc

SEQ ID NO: 64800 - RNA, 23 nt, Artificial Sequence
  Chemically synthesized
gguuucacaagacaaggcaccca

SEQ ID NO: 64801 - RNA, 23 nt, Artificial Sequence
  Chemically synthesized
guuucacaagacaaggcacccag

SEQ ID NO: 64802 - RNA, 23 nt, Artificial Sequence
  Chemically synthesized
uuucacaagacaaggcacccaga

SEQ ID NO: 64803 - RNA, 23 nt, Artificial Sequence
  Chemically synthesized
aaaaccucucucacuccaucuuu

SEQ ID NO: 64804 - RNA, 23 nt, Artificial Sequence
  Chemically synthesized
aaaccucucucacuccaucuuug

SEQ ID NO: 64805 - RNA, 23 nt, Artificial Sequence
  Chemically synthesized
aaccucucucacuccaucuuugg

SEQ ID NO: 64806 - RNA, 23 nt, Artificial Sequence
  Chemically synthesized
ccgccuugugugcucaucauucc

SEQ ID NO: 64807 - RNA, 23 nt, Artificial Sequence
  Chemically synthesized
cgccuugugugcucaucauuccg

SEQ ID NO: 64808 - RNA, 23 nt, Artificial Sequence
  Chemically synthesized
gccuugugugcucaucauuccga

SEQ ID NO: 64809 - RNA, 23 nt, Artificial Sequence
  Chemically synthesized
ccuugugugcucaucauuccgaa

SEQ ID NO: 64810 - RNA, 23 nt, Artificial Sequence
  Chemically synthesized
cuugugugcucaucauuccgaag

SEQ ID NO: 64811 - RNA, 23 nt, Artificial Sequence
  Chemically synthesized
cagaaaugcuugacuucuggggu

SEQ ID NO: 64812 - RNA, 23 nt, Artificial Sequence
  Chemically synthesized
agaaaugcuugacuucugggguc

SEQ ID NO: 64813 - RNA, 23 nt, Artificial Sequence
  Chemically synthesized
gccucaggcgaucauaaucuucc

SEQ ID NO: 64814 - RNA, 23 nt, Artificial Sequence
  Chemically synthesized
ccucaggcgaucauaaucuuccu

SEQ ID NO: 64815 - RNA, 23 nt, Artificial Sequence
  Chemically synthesized
cucaggcgaucauaaucuuccug

SEQ ID NO: 64816 - RNA, 23 nt, Artificial Sequence
  Chemically synthesized
ucaggcgaucauaaucuuccugc

SEQ ID NO: 64817 - RNA, 23 nt, Artificial Sequence
  Chemically synthesized
caggcgaucauaaucuuccugcc

SEQ ID NO: 64818 - RNA, 23 nt, Artificial Sequence
  Chemically synthesized
gugaggagaaaagagcacuguga

SEQ ID NO: 64819 - RNA, 23 nt, Artificial Sequence
  Chemically synthesized
ugaggagaaaagagcacugugaa

SEQ ID NO: 64820 - RNA, 23 nt, Artificial Sequence
  Chemically synthesized
gaggagaaaagagcacugugaau

SEQ ID NO: 64821 - RNA, 23 nt, Artificial Sequence
  Chemically synthesized
cacugugaauuagagccagaugc

SEQ ID NO: 64822 - RNA, 23 nt, Artificial Sequence
  Chemically synthesized
acugugaauuagagccagaugcu

SEQ ID NO: 64823 - RNA, 23 nt, Artificial Sequence
  Chemically synthesized
cugugaauuagagccagaugcuu

SEQ ID NO: 64824 - RNA, 23 nt, Artificial Sequence
  Chemically synthesized
ugugaauuagagccagaugcuua

SEQ ID NO: 64825 - RNA, 23 nt, Artificial Sequence
  Chemically synthesized
gugaauuagagccagaugcuuaa

SEQ ID NO: 64826 - RNA, 23 nt, Artificial Sequence
  Chemically synthesized
gguuaugccaucuuccaaagugu

SEQ ID NO: 64827 - RNA, 23 nt, Artificial Sequence
  Chemically synthesized
guuaugccaucuuccaaaguguc

SEQ ID NO: 64828 - RNA, 23 nt, Artificial Sequence
  Chemically synthesized
uuaugccaucuuccaaagugucu

SEQ ID NO: 64829 - RNA, 23 nt, Artificial Sequence
  Chemically synthesized
uaugccaucuuccaaagugucua

SEQ ID NO: 64830 - RNA, 23 nt, Artificial Sequence
  Chemically synthesized
augccaucuuccaaagugucuaa

SEQ ID NO: 64831 - RNA, 23 nt, Artificial Sequence
  Chemically synthesized
caucuuccaaagugucuaauugc

SEQ ID NO: 64832 - RNA, 23 nt, Artificial Sequence
  Chemically synthesized
aucuuccaaagugucuaauugcc

SEQ ID NO: 64833 - RNA, 23 nt, Artificial Sequence
  Chemically synthesized
ucuuccaaagugucuaauugccu

SEQ ID NO: 64834 - RNA, 23 nt, Artificial Sequence
  Chemically synthesized
cuuccaaagugucuaauugccuc

SEQ ID NO: 64835 - RNA, 23 nt, Artificial Sequence
  Chemically synthesized
uuccaaagugucuaauugccuca

SEQ ID NO: 64836 - RNA, 23 nt, Artificial Sequence
  Chemically synthesized
uccaaagugucuaauugccucag

SEQ ID NO: 64837 - RNA, 23 nt, Artificial Sequence
  Chemically synthesized
aggaugacaguauuaggaaaucc

SEQ ID NO: 64838 - RNA, 23 nt, Artificial Sequence
  Chemically synthesized
ggaugacaguauuaggaaaucca

SEQ ID NO: 64839 - RNA, 23 nt, Artificial Sequence
  Chemically synthesized
gaugacaguauuaggaaauccaa

SEQ ID NO: 64840 - RNA, 23 nt, Artificial Sequence
  Chemically synthesized
augacaguauuaggaaauccaau

SEQ ID NO: 64841 - RNA, 23 nt, Artificial Sequence
  Chemically synthesized
ugacaguauuaggaaauccaauu

SEQ ID NO: 64842 - RNA, 23 nt, Artificial Sequence
  Chemically synthesized
acagcugcaugaacuugggcuuu

SEQ ID NO: 64843 - RNA, 23 nt, Artificial Sequence
  Chemically synthesized
ugcaugaacuugggcuuuucugg

SEQ ID NO: 64844 - RNA, 23 nt, Artificial Sequence
  Chemically synthesized
gcaugaacuugggcuuuucuggu

SEQ ID NO: 64845 - RNA, 23 nt, Artificial Sequence
  Chemically synthesized
caugaacuugggcuuuucugguu

SEQ ID NO: 64846 - RNA, 23 nt, Artificial Sequence
  Chemically synthesized
augaacuugggcuuuucugguug

SEQ ID NO: 64847 - RNA, 23 nt, Artificial Sequence
  Chemically synthesized
ugaacuugggcuuuucugguuga

SEQ ID NO: 64848 - RNA, 23 nt, Artificial Sequence
  Chemically synthesized
uuucaaaaaacugcccaccccag

SEQ ID NO: 64849 - RNA, 23 nt, Artificial Sequence
  Chemically synthesized
uagagcagugucaaaaggacccu

SEQ ID NO: 64850 - RNA, 23 nt, Artificial Sequence
  Chemically synthesized
auaaucauaguuggcuucuaaau

SEQ ID NO: 64851 - RNA, 23 nt, Artificial Sequence
  Chemically synthesized
aaggcacccagauuuuuucuucc

SEQ ID NO: 64852 - RNA, 23 nt, Artificial Sequence
  Chemically synthesized
aggcacccagauuuuuucuuccc

SEQ ID NO: 64853 - RNA, 23 nt, Artificial Sequence
  Chemically synthesized
ggcacccagauuuuuucuuccca

SEQ ID NO: 64854 - RNA, 23 nt, Artificial Sequence
  Chemically synthesized
gcacccagauuuuuucuucccac

SEQ ID NO: 64855 - RNA, 23 nt, Artificial Sequence
  Chemically synthesized
cacccagauuuuuucuucccacg

SEQ ID NO: 64856 - RNA, 23 nt, Artificial Sequence
  Chemically synthesized
uugugugcucaucauuccgaaga

SEQ ID NO: 64857 - RNA, 23 nt, Artificial Sequence
  Chemically synthesized
cgauaucugccacauaguucuca

SEQ ID NO: 64858 - RNA, 23 nt, Artificial Sequence
  Chemically synthesized
gauaucugccacauaguucucaa

SEQ ID NO: 64859 - RNA, 23 nt, Artificial Sequence
  Chemically synthesized
auaucugccacauaguucucaaa

SEQ ID NO: 64860 - RNA, 23 nt, Artificial Sequence
  Chemically synthesized
uaucugccacauaguucucaaac

SEQ ID NO: 64861 - RNA, 23 nt, Artificial Sequence
  Chemically synthesized
aucugccacauaguucucaaaca

SEQ ID NO: 64862 - RNA, 23 nt, Artificial Sequence
  Chemically synthesized
ggaaaaauuaacugguacagaaa

SEQ ID NO: 64863 - RNA, 23 nt, Artificial Sequence
  Chemically synthesized
gaaaaauuaacugguacagaaaa

SEQ ID NO: 64864 - RNA, 23 nt, Artificial Sequence
  Chemically synthesized
ggagagaagagagacugagugcc

SEQ ID NO: 64865 - RNA, 23 nt, Artificial Sequence
  Chemically synthesized
gagagaagagagacugagugcca

SEQ ID NO: 64866 - RNA, 23 nt, Artificial Sequence
  Chemically synthesized
agagaagagagacugagugccac

SEQ ID NO: 64867 - RNA, 23 nt, Artificial Sequence
  Chemically synthesized
gagaagagagacugagugccacc

SEQ ID NO: 64868 - RNA, 23 nt, Artificial Sequence
  Chemically synthesized
agaagagagacugagugccaccc

SEQ ID NO: 64869 - RNA, 23 nt, Artificial Sequence
  Chemically synthesized
agguuaugccaucuuccaaagug

SEQ ID NO: 64870 - RNA, 23 nt, Artificial Sequence
  Chemically synthesized
ccaaagugucuaauugccucagg

SEQ ID NO: 64871 - RNA, 23 nt, Artificial Sequence
  Chemically synthesized
caaagugucuaauugccucaggc

SEQ ID NO: 64872 - RNA, 23 nt, Artificial Sequence
  Chemically synthesized
aaagugucuaauugccucaggcg

SEQ ID NO: 64873 - RNA, 23 nt, Artificial Sequence
  Chemically synthesized
gguaauauggccaucuuuuauca

SEQ ID NO: 64874 - RNA, 23 nt, Artificial Sequence
  Chemically synthesized
guaauauggccaucuuuuaucag

SEQ ID NO: 64875 - RNA, 23 nt, Artificial Sequence
  Chemically synthesized
uaauauggccaucuuuuaucaga

SEQ ID NO: 64876 - RNA, 23 nt, Artificial Sequence
  Chemically synthesized
aauauggccaucuuuuaucagaa

SEQ ID NO: 64877 - RNA, 23 nt, Artificial Sequence
  Chemically synthesized
auauggccaucuuuuaucagaaa

SEQ ID NO: 64878 - RNA, 23 nt, Artificial Sequence
  Chemically synthesized
aaaucuguuacggaguaaagccc

SEQ ID NO: 64879 - RNA, 23 nt, Artificial Sequence
  Chemically synthesized
aaucuguuacggaguaaagcccu

SEQ ID NO: 64880 - RNA, 23 nt, Artificial Sequence
  Chemically synthesized
aucuguuacggaguaaagcccug

SEQ ID NO: 64881 - RNA, 23 nt, Artificial Sequence
  Chemically synthesized
ucuguuacggaguaaagcccuga

SEQ ID NO: 64882 - RNA, 23 nt, Artificial Sequence
  Chemically synthesized
cuguuacggaguaaagcccugaa

SEQ ID NO: 64883 - RNA, 23 nt, Artificial Sequence
  Chemically synthesized
acccagauuuuuucuucccacgu

SEQ ID NO: 64884 - RNA, 23 nt, Artificial Sequence
  Chemically synthesized
ccagauuuuuucuucccacgucu

SEQ ID NO: 64885 - RNA, 23 nt, Artificial Sequence
  Chemically synthesized
cagauuuuuucuucccacgucua

SEQ ID NO: 64886 - RNA, 23 nt, Artificial Sequence
  Chemically synthesized
agauuuuuucuucccacgucuag

SEQ ID NO: 64887 - RNA, 23 nt, Artificial Sequence
  Chemically synthesized
gauuuuuucuucccacgucuagc

SEQ ID NO: 64888 - RNA, 23 nt, Artificial Sequence
  Chemically synthesized
auuuuuucuucccacgucuagcu

SEQ ID NO: 64889 - RNA, 23 nt, Artificial Sequence
  Chemically synthesized
uagccauuucaaaaaccucucuc

SEQ ID NO: 64890 - RNA, 23 nt, Artificial Sequence
  Chemically synthesized
uuucuaaacuaucagggcugucg

SEQ ID NO: 64891 - RNA, 23 nt, Artificial Sequence
  Chemically synthesized
uucuaaacuaucagggcugucga

SEQ ID NO: 64892 - RNA, 23 nt, Artificial Sequence
  Chemically synthesized
ucuaaacuaucagggcugucgau

SEQ ID NO: 64893 - RNA, 23 nt, Artificial Sequence
  Chemically synthesized
cuaaacuaucagggcugucgaug

SEQ ID NO: 64894 - RNA, 23 nt, Artificial Sequence
  Chemically synthesized
uaaacuaucagggcugucgaugg

SEQ ID NO: 64895 - RNA, 23 nt, Artificial Sequence
  Chemically synthesized
cucgauaucugccacauaguucu

SEQ ID NO: 64896 - RNA, 23 nt, Artificial Sequence
  Chemically synthesized
ucgauaucugccacauaguucuc

SEQ ID NO: 64897 - RNA, 23 nt, Artificial Sequence
  Chemically synthesized
ugccacauaguucucaaacacug

SEQ ID NO: 64898 - RNA, 23 nt, Artificial Sequence
  Chemically synthesized
gccacauaguucucaaacacugu

SEQ ID NO: 64899 - RNA, 23 nt, Artificial Sequence
  Chemically synthesized
ccacauaguucucaaacacugug

SEQ ID NO: 64900 - RNA, 23 nt, Artificial Sequence
  Chemically synthesized
uuuuuagaaaacugccuuuauuc

SEQ ID NO: 64901 - RNA, 23 nt, Artificial Sequence
  Chemically synthesized
uuuuagaaaacugccuuuauucu

SEQ ID NO: 64902 - RNA, 23 nt, Artificial Sequence
  Chemically synthesized
uuuagaaaacugccuuuauucua

SEQ ID NO: 64903 - RNA, 23 nt, Artificial Sequence
  Chemically synthesized
gcgugaaaccaauuccuauuuac

SEQ ID NO: 64904 - RNA, 23 nt, Artificial Sequence
  Chemically synthesized
cgugaaaccaauuccuauuuacu

SEQ ID NO: 64905 - RNA, 23 nt, Artificial Sequence
  Chemically synthesized
gugaaaccaauuccuauuuacuu

SEQ ID NO: 64906 - RNA, 23 nt, Artificial Sequence
  Chemically synthesized
ugaaaccaauuccuauuuacuua

SEQ ID NO: 64907 - RNA, 23 nt, Artificial Sequence
  Chemically synthesized
gaaaccaauuccuauuuacuuag

SEQ ID NO: 64908 - RNA, 23 nt, Artificial Sequence
  Chemically synthesized
cugcaugaacuugggcuuuucug

SEQ ID NO: 64909 - RNA, 23 nt, Artificial Sequence
  Chemically synthesized
gaagcaagaaguuaagaaauucc

SEQ ID NO: 64910 - RNA, 23 nt, Artificial Sequence
  Chemically synthesized
aagcaagaaguuaagaaauuccu

SEQ ID NO: 64911 - RNA, 23 nt, Artificial Sequence
  Chemically synthesized
agcaagaaguuaagaaauuccuu

SEQ ID NO: 64912 - RNA, 23 nt, Artificial Sequence
  Chemically synthesized
gcaagaaguuaagaaauuccuug

SEQ ID NO: 64913 - RNA, 23 nt, Artificial Sequence
  Chemically synthesized
caagaaguuaagaaauuccuuga

SEQ ID NO: 64914 - RNA, 23 nt, Artificial Sequence
  Chemically synthesized
agaugacuucugauuuguaaucu

SEQ ID NO: 64915 - RNA, 23 nt, Artificial Sequence
  Chemically synthesized
gaugacuucugauuuguaaucuu

SEQ ID NO: 64916 - RNA, 23 nt, Artificial Sequence
  Chemically synthesized
augacuucugauuuguaaucuua

SEQ ID NO: 64917 - RNA, 23 nt, Artificial Sequence
  Chemically synthesized
ugacuucugauuuguaaucuuag

SEQ ID NO: 64918 - RNA, 23 nt, Artificial Sequence
  Chemically synthesized
gacuucugauuuguaaucuuagg

SEQ ID NO: 64919 - RNA, 23 nt, Artificial Sequence
  Chemically synthesized
aaacagcacuucaaaauuaaccg

SEQ ID NO: 64920 - RNA, 23 nt, Artificial Sequence
  Chemically synthesized
aacagcacuucaaaauuaaccgc

SEQ ID NO: 64921 - RNA, 23 nt, Artificial Sequence
  Chemically synthesized
acagcacuucaaaauuaaccgca

SEQ ID NO: 64922 - RNA, 23 nt, Artificial Sequence
  Chemically synthesized
cagcacuucaaaauuaaccgcau

SEQ ID NO: 64923 - RNA, 23 nt, Artificial Sequence
  Chemically synthesized
agcacuucaaaauuaaccgcaua

SEQ ID NO: 64924 - RNA, 23 nt, Artificial Sequence
  Chemically synthesized
cuugcagcaagguuucacaagac

SEQ ID NO: 64925 - RNA, 23 nt, Artificial Sequence
  Chemically synthesized
uugcagcaagguuucacaagaca

SEQ ID NO: 64926 - RNA, 23 nt, Artificial Sequence
  Chemically synthesized
ugcagcaagguuucacaagacaa

SEQ ID NO: 64927 - RNA, 23 nt, Artificial Sequence
  Chemically synthesized
gcagcaagguuucacaagacaag

SEQ ID NO: 64928 - RNA, 23 nt, Artificial Sequence
  Chemically synthesized
cagcaagguuucacaagacaagg

SEQ ID NO: 64929 - RNA, 23 nt, Artificial Sequence
  Chemically synthesized
uucacaagacaaggcacccagau

SEQ ID NO: 64930 - RNA, 23 nt, Artificial Sequence
  Chemically synthesized
agacaaggcacccagauuuuuuc

SEQ ID NO: 64931 - RNA, 23 nt, Artificial Sequence
  Chemically synthesized
gacaaggcacccagauuuuuucu

SEQ ID NO: 64932 - RNA, 23 nt, Artificial Sequence
  Chemically synthesized
acaaggcacccagauuuuuucuu

SEQ ID NO: 64933 - RNA, 23 nt, Artificial Sequence
  Chemically synthesized
caaggcacccagauuuuuucuuc

SEQ ID NO: 64934 - RNA, 23 nt, Artificial Sequence
  Chemically synthesized
aaaaacacaucaguauaacaucg

SEQ ID NO: 64935 - RNA, 23 nt, Artificial Sequence
  Chemically synthesized
aaaacacaucaguauaacaucgg

SEQ ID NO: 64936 - RNA, 23 nt, Artificial Sequence
  Chemically synthesized
aaacacaucaguauaacaucggu

SEQ ID NO: 64937 - RNA, 23 nt, Artificial Sequence
  Chemically synthesized
aacacaucaguauaacaucggua

SEQ ID NO: 64938 - RNA, 23 nt, Artificial Sequence
  Chemically synthesized
acacaucaguauaacaucgguau

SEQ ID NO: 64939 - RNA, 23 nt, Artificial Sequence
  Chemically synthesized
cacaucaguauaacaucgguauc

SEQ ID NO: 64940 - RNA, 23 nt, Artificial Sequence
  Chemically synthesized
ucaguauaacaucgguaucuggg

SEQ ID NO: 64941 - RNA, 23 nt, Artificial Sequence
  Chemically synthesized
caguauaacaucgguaucugggu

SEQ ID NO: 64942 - RNA, 23 nt, Artificial Sequence
  Chemically synthesized
aguauaacaucgguaucugggua

SEQ ID NO: 64943 - RNA, 23 nt, Artificial Sequence
  Chemically synthesized
guauaacaucgguaucuggguag

SEQ ID NO: 64944 - RNA, 23 nt, Artificial Sequence
  Chemically synthesized
uauaacaucgguaucuggguagg

SEQ ID NO: 64945 - RNA, 23 nt, Artificial Sequence
  Chemically synthesized
gaagagagacugagugccaccca

SEQ ID NO: 64946 - RNA, 23 nt, Artificial Sequence
  Chemically synthesized
aagagagacugagugccacccau

SEQ ID NO: 64947 - RNA, 23 nt, Artificial Sequence
  Chemically synthesized
aaaccaauuccuauuuacuuagc

SEQ ID NO: 64948 - RNA, 23 nt, Artificial Sequence
  Chemically synthesized
ggguaauauggccaucuuuuauc

SEQ ID NO: 64949 - RNA, 23 nt, Artificial Sequence
  Chemically synthesized
uucuuugaggaugacaguauuag

SEQ ID NO: 64950 - RNA, 23 nt, Artificial Sequence
  Chemically synthesized
ucuuugaggaugacaguauuagg

SEQ ID NO: 64951 - RNA, 23 nt, Artificial Sequence
  Chemically synthesized
cuuugaggaugacaguauuagga

SEQ ID NO: 64952 - RNA, 23 nt, Artificial Sequence
  Chemically synthesized
uuugaggaugacaguauuaggaa

SEQ ID NO: 64953 - RNA, 23 nt, Artificial Sequence
  Chemically synthesized
uugaggaugacaguauuaggaaa

SEQ ID NO: 64954 - RNA, 23 nt, Artificial Sequence
  Chemically synthesized
ccacagaacuguaacucugccac

SEQ ID NO: 64955 - RNA, 23 nt, Artificial Sequence
  Chemically synthesized
cacagaacuguaacucugccaca

SEQ ID NO: 64956 - RNA, 23 nt, Artificial Sequence
  Chemically synthesized
acagaacuguaacucugccacag

SEQ ID NO: 64957 - RNA, 23 nt, Artificial Sequence
  Chemically synthesized
cagaacuguaacucugccacagc

SEQ ID NO: 64958 - RNA, 23 nt, Artificial Sequence
  Chemically synthesized
agaacuguaacucugccacagcu

SEQ ID NO: 64959 - RNA, 23 nt, Artificial Sequence
  Chemically synthesized
uucaaaaaacugcccaccccaga

SEQ ID NO: 64960 - RNA, 23 nt, Artificial Sequence
  Chemically synthesized
cagcugacagauaauaggcagga

SEQ ID NO: 64961 - RNA, 23 nt, Artificial Sequence
  Chemically synthesized
agcugacagauaauaggcaggac

SEQ ID NO: 64962 - RNA, 23 nt, Artificial Sequence
  Chemically synthesized
gcugacagauaauaggcaggaca

SEQ ID NO: 64963 - RNA, 23 nt, Artificial Sequence
  Chemically synthesized
cugacagauaauaggcaggacau

SEQ ID NO: 64964 - RNA, 23 nt, Artificial Sequence
  Chemically synthesized
ugacagauaauaggcaggacaug

SEQ ID NO: 64965 - RNA, 23 nt, Artificial Sequence
  Chemically synthesized
auuccuugaauuagcgccuggug

SEQ ID NO: 64966 - RNA, 23 nt, Artificial Sequence
  Chemically synthesized
cauaguuggcuucuaaauacugg

SEQ ID NO: 64967 - RNA, 23 nt, Artificial Sequence
  Chemically synthesized
auaguuggcuucuaaauacuggu

SEQ ID NO: 64968 - RNA, 23 nt, Artificial Sequence
  Chemically synthesized
augaaaaaggccaguaaucauac

SEQ ID NO: 64969 - RNA, 23 nt, Artificial Sequence
  Chemically synthesized
ugaaaaaggccaguaaucauaca

SEQ ID NO: 64970 - RNA, 23 nt, Artificial Sequence
  Chemically synthesized
uuuuuucuucccacgucuagcuu

SEQ ID NO: 64971 - RNA, 23 nt, Artificial Sequence
  Chemically synthesized
uuuuucuucccacgucuagcuug

SEQ ID NO: 64972 - RNA, 23 nt, Artificial Sequence
  Chemically synthesized
uuuucuucccacgucuagcuugc

SEQ ID NO: 64973 - RNA, 23 nt, Artificial Sequence
  Chemically synthesized
uuucuucccacgucuagcuugca

SEQ ID NO: 64974 - RNA, 23 nt, Artificial Sequence
  Chemically synthesized
gcucaucauuccgaagauccuuc

SEQ ID NO: 64975 - RNA, 23 nt, Artificial Sequence
  Chemically synthesized
cucaucauuccgaagauccuucu

SEQ ID NO: 64976 - RNA, 23 nt, Artificial Sequence
  Chemically synthesized
ucaucauuccgaagauccuucuu

SEQ ID NO: 64977 - RNA, 23 nt, Artificial Sequence
  Chemically synthesized
caucauuccgaagauccuucuua

SEQ ID NO: 64978 - RNA, 23 nt, Artificial Sequence
  Chemically synthesized
aucauuccgaagauccuucuuau

SEQ ID NO: 64979 - RNA, 23 nt, Artificial Sequence
  Chemically synthesized
gaagauccuucuuauucccaacc

SEQ ID NO: 64980 - RNA, 23 nt, Artificial Sequence
  Chemically synthesized
aagauccuucuuauucccaacca

SEQ ID NO: 64981 - RNA, 23 nt, Artificial Sequence
  Chemically synthesized
agauccuucuuauucccaaccag

SEQ ID NO: 64982 - RNA, 23 nt, Artificial Sequence
  Chemically synthesized
gauccuucuuauucccaaccagg

SEQ ID NO: 64983 - RNA, 23 nt, Artificial Sequence
  Chemically synthesized
auccuucuuauucccaaccagga

SEQ ID NO: 64984 - RNA, 23 nt, Artificial Sequence
  Chemically synthesized
gaaaacugccuuuauucuauuag

SEQ ID NO: 64985 - RNA, 23 nt, Artificial Sequence
  Chemically synthesized
aaaacugccuuuauucuauuagu

SEQ ID NO: 64986 - RNA, 23 nt, Artificial Sequence
  Chemically synthesized
aaacugccuuuauucuauuagua

SEQ ID NO: 64987 - RNA, 23 nt, Artificial Sequence
  Chemically synthesized
aacugccuuuauucuauuaguag

SEQ ID NO: 64988 - RNA, 23 nt, Artificial Sequence
  Chemically synthesized
acugccuuuauucuauuaguagu

SEQ ID NO: 64989 - RNA, 23 nt, Artificial Sequence
  Chemically synthesized
uggagagaagagagacugagugc

SEQ ID NO: 64990 - RNA, 23 nt, Artificial Sequence
  Chemically synthesized
uuccuauuuacuuagcccagcuc

SEQ ID NO: 64991 - RNA, 23 nt, Artificial Sequence
  Chemically synthesized
aaaaaaugaauuuuccaucugac

SEQ ID NO: 64992 - RNA, 23 nt, Artificial Sequence
  Chemically synthesized
aaaaaugaauuuuccaucugacu

SEQ ID NO: 64993 - RNA, 23 nt, Artificial Sequence
  Chemically synthesized
aaaaugaauuuuccaucugacuu

SEQ ID NO: 64994 - RNA, 23 nt, Artificial Sequence
  Chemically synthesized
aaaugaauuuuccaucugacuuu

SEQ ID NO: 64995 - RNA, 23 nt, Artificial Sequence
  Chemically synthesized
aaugaauuuuccaucugacuuua

SEQ ID NO: 64996 - RNA, 23 nt, Artificial Sequence
  Chemically synthesized
aaaaaaccaauacacuuucuuug

SEQ ID NO: 64997 - RNA, 23 nt, Artificial Sequence
  Chemically synthesized
aaaaaccaauacacuuucuuuga

SEQ ID NO: 64998 - RNA, 23 nt, Artificial Sequence
  Chemically synthesized
aaaaccaauacacuuucuuugag

SEQ ID NO: 64999 - RNA, 23 nt, Artificial Sequence
  Chemically synthesized
aaaccaauacacuuucuuugagg

SEQ ID NO: 65000 - RNA, 23 nt, Artificial Sequence
  Chemically synthesized
aaccaauacacuuucuuugagga

SEQ ID NO: 65001 - RNA, 23 nt, Artificial Sequence
  Chemically synthesized
gaggaugacaguauuaggaaauc

SEQ ID NO: 65002 - RNA, 23 nt, Artificial Sequence
  Chemically synthesized
ccagagcuaugccaacaaaaucu

SEQ ID NO: 65003 - RNA, 23 nt, Artificial Sequence
  Chemically synthesized
cagagcuaugccaacaaaaucug

SEQ ID NO: 65004 - RNA, 23 nt, Artificial Sequence
  Chemically synthesized
agagcuaugccaacaaaaucugu

SEQ ID NO: 65005 - RNA, 23 nt, Artificial Sequence
  Chemically synthesized
gagcuaugccaacaaaaucuguu

SEQ ID NO: 65006 - RNA, 23 nt, Artificial Sequence
  Chemically synthesized
agcuaugccaacaaaaucuguua

SEQ ID NO: 65007 - RNA, 23 nt, Artificial Sequence
  Chemically synthesized
uaaucauaguuggcuucuaaaua

SEQ ID NO: 65008 - RNA, 23 nt, Artificial Sequence
  Chemically synthesized
aaucauaguuggcuucuaaauac

SEQ ID NO: 65009 - RNA, 23 nt, Artificial Sequence
  Chemically synthesized
uacugguagcaagaugacuucug

SEQ ID NO: 65010 - RNA, 23 nt, Artificial Sequence
  Chemically synthesized
acugguagcaagaugacuucuga

SEQ ID NO: 65011 - RNA, 23 nt, Artificial Sequence
  Chemically synthesized
cugguagcaagaugacuucugau

SEQ ID NO: 65012 - RNA, 23 nt, Artificial Sequence
  Chemically synthesized
aaugaaaaaggccaguaaucaua

SEQ ID NO: 65013 - RNA, 23 nt, Artificial Sequence
  Chemically synthesized
agauuaauaaacagcacuucaaa

SEQ ID NO: 65014 - RNA, 23 nt, Artificial Sequence
  Chemically synthesized
gauuaauaaacagcacuucaaaa

SEQ ID NO: 65015 - RNA, 23 nt, Artificial Sequence
  Chemically synthesized
gcacuucaaaauuaaccgcauaa

SEQ ID NO: 65016 - RNA, 23 nt, Artificial Sequence
  Chemically synthesized
cacuucaaaauuaaccgcauaag

SEQ ID NO: 65017 - RNA, 23 nt, Artificial Sequence
  Chemically synthesized
cccagauuuuuucuucccacguc

SEQ ID NO: 65018 - RNA, 23 nt, Artificial Sequence
  Chemically synthesized
ucguagccauuucaaaaaccucu

SEQ ID NO: 65019 - RNA, 23 nt, Artificial Sequence
  Chemically synthesized
cguagccauuucaaaaaccucuc

SEQ ID NO: 65020 - RNA, 23 nt, Artificial Sequence
  Chemically synthesized
guagccauuucaaaaaccucucu

SEQ ID NO: 65021 - RNA, 23 nt, Artificial Sequence
  Chemically synthesized
ugugugcucaucauuccgaagau

SEQ ID NO: 65022 - RNA, 23 nt, Artificial Sequence
  Chemically synthesized
gaaaugcuugacuucuggggucc

SEQ ID NO: 65023 - RNA, 23 nt, Artificial Sequence
  Chemically synthesized
ggggccucaggcgaucauaaucu

SEQ ID NO: 65024 - RNA, 23 nt, Artificial Sequence
  Chemically synthesized
gggccucaggcgaucauaaucuu

SEQ ID NO: 65025 - RNA, 23 nt, Artificial Sequence
  Chemically synthesized
ggccucaggcgaucauaaucuuc

SEQ ID NO: 65026 - RNA, 23 nt, Artificial Sequence
  Chemically synthesized
ggcgaucauaaucuuccugccca

SEQ ID NO: 65027 - RNA, 23 nt, Artificial Sequence
  Chemically synthesized
gcgaucauaaucuuccugcccag

SEQ ID NO: 65028 - RNA, 23 nt, Artificial Sequence
  Chemically synthesized
cgaucauaaucuuccugcccagc

SEQ ID NO: 65029 - RNA, 23 nt, Artificial Sequence
  Chemically synthesized
gaucauaaucuuccugcccagcu

SEQ ID NO: 65030 - RNA, 23 nt, Artificial Sequence
  Chemically synthesized
aucauaaucuuccugcccagcug

SEQ ID NO: 65031 - RNA, 23 nt, Artificial Sequence
  Chemically synthesized
ucauaaucuuccugcccagcugu

SEQ ID NO: 65032 - RNA, 23 nt, Artificial Sequence
  Chemically synthesized
cauaaucuuccugcccagcugug

SEQ ID NO: 65033 - RNA, 23 nt, Artificial Sequence
  Chemically synthesized
auaaucuuccugcccagcugugu

SEQ ID NO: 65034 - RNA, 23 nt, Artificial Sequence
  Chemically synthesized
uaaucuuccugcccagcuguguc

SEQ ID NO: 65035 - RNA, 23 nt, Artificial Sequence
  Chemically synthesized
ucccacaaagccaacucuaccug

SEQ ID NO: 65036 - RNA, 23 nt, Artificial Sequence
  Chemically synthesized
cccacaaagccaacucuaccugc

SEQ ID NO: 65037 - RNA, 23 nt, Artificial Sequence
  Chemically synthesized
ccacaaagccaacucuaccugcu

SEQ ID NO: 65038 - RNA, 23 nt, Artificial Sequence
  Chemically synthesized
cacaaagccaacucuaccugcuu

SEQ ID NO: 65039 - RNA, 23 nt, Artificial Sequence
  Chemically synthesized
uuccauccaccucgauaucugcc

SEQ ID NO: 65040 - RNA, 23 nt, Artificial Sequence
  Chemically synthesized
uccauccaccucgauaucugcca

SEQ ID NO: 65041 - RNA, 23 nt, Artificial Sequence
  Chemically synthesized
ccauccaccucgauaucugccac

SEQ ID NO: 65042 - RNA, 23 nt, Artificial Sequence
  Chemically synthesized
cauccaccucgauaucugccaca

SEQ ID NO: 65043 - RNA, 23 nt, Artificial Sequence
  Chemically synthesized
auccaccucgauaucugccacau

SEQ ID NO: 65044 - RNA, 23 nt, Artificial Sequence
  Chemically synthesized
ccaucuuccaaagugucuaauug

SEQ ID NO: 65045 - RNA, 23 nt, Artificial Sequence
  Chemically synthesized
aagugucuaauugccucaggcgu

SEQ ID NO: 65046 - RNA, 23 nt, Artificial Sequence
  Chemically synthesized
uccuauuuacuuagcccagcucc

SEQ ID NO: 65047 - RNA, 23 nt, Artificial Sequence
  Chemically synthesized
ccuauuuacuuagcccagcucca

SEQ ID NO: 65048 - RNA, 23 nt, Artificial Sequence
  Chemically synthesized
cuauuuacuuagcccagcuccau

SEQ ID NO: 65049 - RNA, 23 nt, Artificial Sequence
  Chemically synthesized
uauuuacuuagcccagcuccaug

SEQ ID NO: 65050 - RNA, 23 nt, Artificial Sequence
  Chemically synthesized
auuuacuuagcccagcuccaugg

SEQ ID NO: 65051 - RNA, 23 nt, Artificial Sequence
  Chemically synthesized
uaacuaacaugaaaccacagaac

SEQ ID NO: 65052 - RNA, 23 nt, Artificial Sequence
  Chemically synthesized
aacuaacaugaaaccacagaacu

SEQ ID NO: 65053 - RNA, 23 nt, Artificial Sequence
  Chemically synthesized
acuaacaugaaaccacagaacug

SEQ ID NO: 65054 - RNA, 23 nt, Artificial Sequence
  Chemically synthesized
cuaacaugaaaccacagaacugu

SEQ ID NO: 65055 - RNA, 23 nt, Artificial Sequence
  Chemically synthesized
uaacaugaaaccacagaacugua

SEQ ID NO: 65056 - RNA, 23 nt, Artificial Sequence
  Chemically synthesized
aacaugaaaccacagaacuguaa

SEQ ID NO: 65057 - RNA, 23 nt, Artificial Sequence
  Chemically synthesized
acaugaaaccacagaacuguaac

SEQ ID NO: 65058 - RNA, 23 nt, Artificial Sequence
  Chemically synthesized
caugaaaccacagaacuguaacu

SEQ ID NO: 65059 - RNA, 23 nt, Artificial Sequence
  Chemically synthesized
gcuaugccaacaaaaucuguuac

SEQ ID NO: 65060 - RNA, 23 nt, Artificial Sequence
  Chemically synthesized
cuaugccaacaaaaucuguuacg

SEQ ID NO: 65061 - RNA, 23 nt, Artificial Sequence
  Chemically synthesized
uaugccaacaaaaucuguuacgg

SEQ ID NO: 65062 - RNA, 23 nt, Artificial Sequence
  Chemically synthesized
gacagauaauaggcaggacaugu

SEQ ID NO: 65063 - RNA, 23 nt, Artificial Sequence
  Chemically synthesized
cuagaaagaagcaagaaguuaag

SEQ ID NO: 65064 - RNA, 23 nt, Artificial Sequence
  Chemically synthesized
uagaaagaagcaagaaguuaaga

SEQ ID NO: 65065 - RNA, 23 nt, Artificial Sequence
  Chemically synthesized
agaaagaagcaagaaguuaagaa

SEQ ID NO: 65066 - RNA, 23 nt, Artificial Sequence
  Chemically synthesized
gaaagaagcaagaaguuaagaaa

SEQ ID NO: 65067 - RNA, 23 nt, Artificial Sequence
  Chemically synthesized
aaagaagcaagaaguuaagaaau

SEQ ID NO: 65068 - RNA, 23 nt, Artificial Sequence
  Chemically synthesized
uuccuugaauuagcgccuggugu

SEQ ID NO: 65069 - RNA, 23 nt, Artificial Sequence
  Chemically synthesized
uccuugaauuagcgccuggugug

SEQ ID NO: 65070 - RNA, 23 nt, Artificial Sequence
  Chemically synthesized
acuucugauuuguaaucuuaggu

SEQ ID NO: 65071 - RNA, 23 nt, Artificial Sequence
  Chemically synthesized
cuucugauuuguaaucuuaggua

SEQ ID NO: 65072 - RNA, 23 nt, Artificial Sequence
  Chemically synthesized
uucugauuuguaaucuuagguaa

SEQ ID NO: 65073 - RNA, 23 nt, Artificial Sequence
  Chemically synthesized
ucacaagacaaggcacccagauu

SEQ ID NO: 65074 - RNA, 23 nt, Artificial Sequence
  Chemically synthesized
acaucaguauaacaucgguaucu

SEQ ID NO: 65075 - RNA, 23 nt, Artificial Sequence
  Chemically synthesized
caucaguauaacaucgguaucug

SEQ ID NO: 65076 - RNA, 23 nt, Artificial Sequence
  Chemically synthesized
aucaguauaacaucgguaucugg

SEQ ID NO: 65077 - RNA, 23 nt, Artificial Sequence
  Chemically synthesized
auaacaucgguaucuggguagga

SEQ ID NO: 65078 - RNA, 23 nt, Artificial Sequence
  Chemically synthesized
cugugucccacaaagccaacucu

SEQ ID NO: 65079 - RNA, 23 nt, Artificial Sequence
  Chemically synthesized
ugugucccacaaagccaacucua

SEQ ID NO: 65080 - RNA, 23 nt, Artificial Sequence
  Chemically synthesized
gugucccacaaagccaacucuac

SEQ ID NO: 65081 - RNA, 23 nt, Artificial Sequence
  Chemically synthesized
ugucccacaaagccaacucuacc

SEQ ID NO: 65082 - RNA, 23 nt, Artificial Sequence
  Chemically synthesized
gucccacaaagccaacucuaccu

SEQ ID NO: 65083 - RNA, 23 nt, Artificial Sequence
  Chemically synthesized
aaagccaacucuaccugcuuucc

SEQ ID NO: 65084 - RNA, 23 nt, Artificial Sequence
  Chemically synthesized
uccaccucgauaucugccacaua

SEQ ID NO: 65085 - RNA, 23 nt, Artificial Sequence
  Chemically synthesized
aguccaggugagacagguuaugc

SEQ ID NO: 65086 - RNA, 23 nt, Artificial Sequence
  Chemically synthesized
guccaggugagacagguuaugcc

SEQ ID NO: 65087 - RNA, 23 nt, Artificial Sequence
  Chemically synthesized
uccaggugagacagguuaugcca

SEQ ID NO: 65088 - RNA, 23 nt, Artificial Sequence
  Chemically synthesized
ccaggugagacagguuaugccau

SEQ ID NO: 65089 - RNA, 23 nt, Artificial Sequence
  Chemically synthesized
caggugagacagguuaugccauc

SEQ ID NO: 65090 - RNA, 23 nt, Artificial Sequence
  Chemically synthesized
augaauuuuccaucugacuuuau

SEQ ID NO: 65091 - RNA, 23 nt, Artificial Sequence
  Chemically synthesized
ugaauuuuccaucugacuuuauu

SEQ ID NO: 65092 - RNA, 23 nt, Artificial Sequence
  Chemically synthesized
gaauuuuccaucugacuuuauuu

SEQ ID NO: 65093 - RNA, 23 nt, Artificial Sequence
  Chemically synthesized
ugaggaugacaguauuaggaaau

SEQ ID NO: 65094 - RNA, 23 nt, Artificial Sequence
  Chemically synthesized
cuauaagguaacuaacaugaaac

SEQ ID NO: 65095 - RNA, 23 nt, Artificial Sequence
  Chemically synthesized
uauaagguaacuaacaugaaacc

SEQ ID NO: 65096 - RNA, 23 nt, Artificial Sequence
  Chemically synthesized
auaagguaacuaacaugaaacca

SEQ ID NO: 65097 - RNA, 23 nt, Artificial Sequence
  Chemically synthesized
uaagguaacuaacaugaaaccac

SEQ ID NO: 65098 - RNA, 23 nt, Artificial Sequence
  Chemically synthesized
aagguaacuaacaugaaaccaca

SEQ ID NO: 65099 - RNA, 23 nt, Artificial Sequence
  Chemically synthesized
cuugcagcugacagauaauaggc

SEQ ID NO: 65100 - RNA, 23 nt, Artificial Sequence
  Chemically synthesized
uugcagcugacagauaauaggca

SEQ ID NO: 65101 - RNA, 23 nt, Artificial Sequence
  Chemically synthesized
ugcagcugacagauaauaggcag

SEQ ID NO: 65102 - RNA, 23 nt, Artificial Sequence
  Chemically synthesized
gcagcugacagauaauaggcagg

SEQ ID NO: 65103 - RNA, 23 nt, Artificial Sequence
  Chemically synthesized
aagaaguuaagaaauuccuugaa

SEQ ID NO: 65104 - RNA, 23 nt, Artificial Sequence
  Chemically synthesized
agaaguuaagaaauuccuugaau

SEQ ID NO: 65105 - RNA, 23 nt, Artificial Sequence
  Chemically synthesized
gaaguuaagaaauuccuugaauu

SEQ ID NO: 65106 - RNA, 23 nt, Artificial Sequence
  Chemically synthesized
ucucguagccauuucaaaaaccu

SEQ ID NO: 65107 - RNA, 23 nt, Artificial Sequence
  Chemically synthesized
cucguagccauuucaaaaaccuc

SEQ ID NO: 65108 - RNA, 23 nt, Artificial Sequence
  Chemically synthesized
cugcuucaucuuggcuagcuccc

SEQ ID NO: 65109 - RNA, 23 nt, Artificial Sequence
  Chemically synthesized
ugcuucaucuuggcuagcucccg

SEQ ID NO: 65110 - RNA, 23 nt, Artificial Sequence
  Chemically synthesized
gcuucaucuuggcuagcucccgc

SEQ ID NO: 65111 - RNA, 23 nt, Artificial Sequence
  Chemically synthesized
cuucaucuuggcuagcucccgcc

SEQ ID NO: 65112 - RNA, 23 nt, Artificial Sequence
  Chemically synthesized
uucaucuuggcuagcucccgccu

SEQ ID NO: 65113 - RNA, 23 nt, Artificial Sequence
  Chemically synthesized
uccuucuuauucccaaccaggau

SEQ ID NO: 65114 - RNA, 23 nt, Artificial Sequence
  Chemically synthesized
aaacuaucagggcugucgaugga

SEQ ID NO: 65115 - RNA, 23 nt, Artificial Sequence
  Chemically synthesized
aacuaucagggcugucgauggaa

SEQ ID NO: 65116 - RNA, 23 nt, Artificial Sequence
  Chemically synthesized
acuaucagggcugucgauggaaa

SEQ ID NO: 65117 - RNA, 23 nt, Artificial Sequence
  Chemically synthesized
cuaucagggcugucgauggaaaa

SEQ ID NO: 65118 - RNA, 23 nt, Artificial Sequence
  Chemically synthesized
uaucagggcugucgauggaaaaa

SEQ ID NO: 65119 - RNA, 23 nt, Artificial Sequence
  Chemically synthesized
uacagaaaaaaaguuuagucagc

SEQ ID NO: 65120 - RNA, 23 nt, Artificial Sequence
  Chemically synthesized
acagaaaaaaaguuuagucagcu

SEQ ID NO: 65121 - RNA, 23 nt, Artificial Sequence
  Chemically synthesized
cagaaaaaaaguuuagucagcug

SEQ ID NO: 65122 - RNA, 23 nt, Artificial Sequence
  Chemically synthesized
agaaaaaaaguuuagucagcugg

SEQ ID NO: 65123 - RNA, 23 nt, Artificial Sequence
  Chemically synthesized
gaaaaaaaguuuagucagcugga

SEQ ID NO: 65124 - RNA, 23 nt, Artificial Sequence
  Chemically synthesized
cuggagagaagagagacugagug

SEQ ID NO: 65125 - RNA, 23 nt, Artificial Sequence
  Chemically synthesized
gcacauacaccucugggaacugg

SEQ ID NO: 65126 - RNA, 23 nt, Artificial Sequence
  Chemically synthesized
cacauacaccucugggaacuggu

SEQ ID NO: 65127 - RNA, 23 nt, Artificial Sequence
  Chemically synthesized
acauacaccucugggaacugguc

SEQ ID NO: 65128 - RNA, 23 nt, Artificial Sequence
  Chemically synthesized
cauacaccucugggaacuggucc

SEQ ID NO: 65129 - RNA, 23 nt, Artificial Sequence
  Chemically synthesized
auacaccucugggaacugguccu

SEQ ID NO: 65130 - RNA, 23 nt, Artificial Sequence
  Chemically synthesized
uaaacagcacuucaaaauuaacc

SEQ ID NO: 65131 - RNA, 23 nt, Artificial Sequence
  Chemically synthesized
uaacaucgguaucuggguaggag

SEQ ID NO: 65132 - RNA, 23 nt, Artificial Sequence
  Chemically synthesized
aacaucgguaucuggguaggaga

SEQ ID NO: 65133 - RNA, 23 nt, Artificial Sequence
  Chemically synthesized
acaucgguaucuggguaggagag

SEQ ID NO: 65134 - RNA, 23 nt, Artificial Sequence
  Chemically synthesized
acucuaccugcuuuccauccacc

SEQ ID NO: 65135 - RNA, 23 nt, Artificial Sequence
  Chemically synthesized
cucuaccugcuuuccauccaccu

SEQ ID NO: 65136 - RNA, 23 nt, Artificial Sequence
  Chemically synthesized
ucuaccugcuuuccauccaccuc

SEQ ID NO: 65137 - RNA, 23 nt, Artificial Sequence
  Chemically synthesized
cuaccugcuuuccauccaccucg

SEQ ID NO: 65138 - RNA, 23 nt, Artificial Sequence
  Chemically synthesized
uaccugcuuuccauccaccucga

SEQ ID NO: 65139 - RNA, 23 nt, Artificial Sequence
  Chemically synthesized
uuuccauccaccucgauaucugc

SEQ ID NO: 65140 - RNA, 23 nt, Artificial Sequence
  Chemically synthesized
ggauacagugaggagaaaagagc

SEQ ID NO: 65141 - RNA, 23 nt, Artificial Sequence
  Chemically synthesized
gauacagugaggagaaaagagca

SEQ ID NO: 65142 - RNA, 23 nt, Artificial Sequence
  Chemically synthesized
agugucuaauugccucaggcgug

SEQ ID NO: 65143 - RNA, 23 nt, Artificial Sequence
  Chemically synthesized
aauuuuccaucugacuuuauuuc

SEQ ID NO: 65144 - RNA, 23 nt, Artificial Sequence
  Chemically synthesized
auuuuccaucugacuuuauuucc

SEQ ID NO: 65145 - RNA, 23 nt, Artificial Sequence
  Chemically synthesized
agguaacuaacaugaaaccacag

SEQ ID NO: 65146 - RNA, 23 nt, Artificial Sequence
  Chemically synthesized
gguaacuaacaugaaaccacaga

SEQ ID NO: 65147 - RNA, 23 nt, Artificial Sequence
  Chemically synthesized
guaacuaacaugaaaccacagaa

SEQ ID NO: 65148 - RNA, 23 nt, Artificial Sequence
  Chemically synthesized
ugugcucaucauuccgaagaucc

SEQ ID NO: 65149 - RNA, 23 nt, Artificial Sequence
  Chemically synthesized
gugcucaucauuccgaagauccu

SEQ ID NO: 65150 - RNA, 23 nt, Artificial Sequence
  Chemically synthesized
ugcucaucauuccgaagauccuu

SEQ ID NO: 65151 - RNA, 23 nt, Artificial Sequence
  Chemically synthesized
gaaaaacacaucaguauaacauc

SEQ ID NO: 65152 - RNA, 23 nt, Artificial Sequence
  Chemically synthesized
ccucgauaucugccacauaguuc

SEQ ID NO: 65153 - RNA, 23 nt, Artificial Sequence
  Chemically synthesized
guggacuaacgagagaaccgacg

SEQ ID NO: 65154 - RNA, 23 nt, Artificial Sequence
  Chemically synthesized
uggacuaacgagagaaccgacgg

SEQ ID NO: 65155 - RNA, 23 nt, Artificial Sequence
  Chemically synthesized
ggacuaacgagagaaccgacgga

SEQ ID NO: 65156 - RNA, 23 nt, Artificial Sequence
  Chemically synthesized
gacuaacgagagaaccgacggag

SEQ ID NO: 65157 - RNA, 23 nt, Artificial Sequence
  Chemically synthesized
acuaacgagagaaccgacggagg

SEQ ID NO: 65158 - RNA, 23 nt, Artificial Sequence
  Chemically synthesized
uacacuuucuuugaggaugacag

SEQ ID NO: 65159 - RNA, 23 nt, Artificial Sequence
  Chemically synthesized
acacuuucuuugaggaugacagu

SEQ ID NO: 65160 - RNA, 23 nt, Artificial Sequence
  Chemically synthesized
cacuuucuuugaggaugacagua

SEQ ID NO: 65161 - RNA, 23 nt, Artificial Sequence
  Chemically synthesized
acuuucuuugaggaugacaguau

SEQ ID NO: 65162 - RNA, 23 nt, Artificial Sequence
  Chemically synthesized
cuuucuuugaggaugacaguauu

SEQ ID NO: 65163 - RNA, 23 nt, Artificial Sequence
  Chemically synthesized
uuucuuugaggaugacaguauua

SEQ ID NO: 65164 - RNA, 23 nt, Artificial Sequence
  Chemically synthesized
ccaacucuaccugcuuuccaucc

SEQ ID NO: 65165 - RNA, 23 nt, Artificial Sequence
  Chemically synthesized
caacucuaccugcuuuccaucca

SEQ ID NO: 65166 - RNA, 23 nt, Artificial Sequence
  Chemically synthesized
aacucuaccugcuuuccauccac

SEQ ID NO: 65167 - RNA, 23 nt, Artificial Sequence
  Chemically synthesized
cugcuuuccauccaccucgauau

SEQ ID NO: 65168 - RNA, 23 nt, Artificial Sequence
  Chemically synthesized
ugcuuuccauccaccucgauauc

SEQ ID NO: 65169 - RNA, 23 nt, Artificial Sequence
  Chemically synthesized
gcuuuccauccaccucgauaucu

SEQ ID NO: 65170 - RNA, 23 nt, Artificial Sequence
  Chemically synthesized
cuuuccauccaccucgauaucug

SEQ ID NO: 65171 - RNA, 23 nt, Artificial Sequence
  Chemically synthesized
ucagcuggagagaagagagacug

SEQ ID NO: 65172 - RNA, 23 nt, Artificial Sequence
  Chemically synthesized
cagcuggagagaagagagacuga

SEQ ID NO: 65173 - RNA, 23 nt, Artificial Sequence
  Chemically synthesized
agcuggagagaagagagacugag

SEQ ID NO: 65174 - RNA, 23 nt, Artificial Sequence
  Chemically synthesized
gcuggagagaagagagacugagu

SEQ ID NO: 65175 - RNA, 23 nt, Artificial Sequence
  Chemically synthesized
uggauacagugaggagaaaagag

SEQ ID NO: 65176 - RNA, 23 nt, Artificial Sequence
  Chemically synthesized
ccucucucacuccaucuuugguc

SEQ ID NO: 65177 - RNA, 23 nt, Artificial Sequence
  Chemically synthesized
cucucucacuccaucuuuggucu

SEQ ID NO: 65178 - RNA, 23 nt, Artificial Sequence
  Chemically synthesized
ucucucacuccaucuuuggucuu

SEQ ID NO: 65179 - RNA, 23 nt, Artificial Sequence
  Chemically synthesized
cucucacuccaucuuuggucuuu

SEQ ID NO: 65180 - RNA, 23 nt, Artificial Sequence
  Chemically synthesized
ucucacuccaucuuuggucuuug

SEQ ID NO: 65181 - RNA, 23 nt, Artificial Sequence
  Chemically synthesized
ccugcuucaucuuggcuagcucc

SEQ ID NO: 65182 - RNA, 23 nt, Artificial Sequence
  Chemically synthesized
accaauacacuuucuuugaggau

SEQ ID NO: 65183 - RNA, 23 nt, Artificial Sequence
  Chemically synthesized
ugacucaccagaguaccuugcag

SEQ ID NO: 65184 - RNA, 23 nt, Artificial Sequence
  Chemically synthesized
gacucaccagaguaccuugcagc

SEQ ID NO: 65185 - RNA, 23 nt, Artificial Sequence
  Chemically synthesized
acucaccagaguaccuugcagcu

SEQ ID NO: 65186 - RNA, 23 nt, Artificial Sequence
  Chemically synthesized
cucaccagaguaccuugcagcug

SEQ ID NO: 65187 - RNA, 23 nt, Artificial Sequence
  Chemically synthesized
ucaccagaguaccuugcagcuga

SEQ ID NO: 65188 - RNA, 23 nt, Artificial Sequence
  Chemically synthesized
agagcagugucaaaaggacccug

SEQ ID NO: 65189 - RNA, 23 nt, Artificial Sequence
  Chemically synthesized
gagcagugucaaaaggacccugg

SEQ ID NO: 65190 - RNA, 23 nt, Artificial Sequence
  Chemically synthesized
agcagugucaaaaggacccuggu

SEQ ID NO: 65191 - RNA, 23 nt, Artificial Sequence
  Chemically synthesized
aaaauuaaccgcauaagggcugu

SEQ ID NO: 65192 - RNA, 23 nt, Artificial Sequence
  Chemically synthesized
aaauuaaccgcauaagggcugug

SEQ ID NO: 65193 - RNA, 23 nt, Artificial Sequence
  Chemically synthesized
aauuaaccgcauaagggcugugc

SEQ ID NO: 65194 - RNA, 23 nt, Artificial Sequence
  Chemically synthesized
auuaaccgcauaagggcugugcu

SEQ ID NO: 65195 - RNA, 23 nt, Artificial Sequence
  Chemically synthesized
uuaaccgcauaagggcugugcuu

SEQ ID NO: 65196 - RNA, 23 nt, Artificial Sequence
  Chemically synthesized
cuucuuauucccaaccaggauga

SEQ ID NO: 65197 - RNA, 23 nt, Artificial Sequence
  Chemically synthesized
uucuuauucccaaccaggaugau

SEQ ID NO: 65198 - RNA, 23 nt, Artificial Sequence
  Chemically synthesized
ucuuauucccaaccaggaugaug

SEQ ID NO: 65199 - RNA, 23 nt, Artificial Sequence
  Chemically synthesized
cuuauucccaaccaggaugaugg

SEQ ID NO: 65200 - RNA, 23 nt, Artificial Sequence
  Chemically synthesized
uuauucccaaccaggaugauggg

SEQ ID NO: 65201 - RNA, 23 nt, Artificial Sequence
  Chemically synthesized
agccaacucuaccugcuuuccau

SEQ ID NO: 65202 - RNA, 23 nt, Artificial Sequence
  Chemically synthesized
gccaacucuaccugcuuuccauc

SEQ ID NO: 65203 - RNA, 23 nt, Artificial Sequence
  Chemically synthesized
gccucaggcgugaaaccaauucc

SEQ ID NO: 65204 - RNA, 23 nt, Artificial Sequence
  Chemically synthesized
ccucaggcgugaaaccaauuccu

SEQ ID NO: 65205 - RNA, 23 nt, Artificial Sequence
  Chemically synthesized
cucaggcgugaaaccaauuccua

SEQ ID NO: 65206 - RNA, 23 nt, Artificial Sequence
  Chemically synthesized
ucaggcgugaaaccaauuccuau

SEQ ID NO: 65207 - RNA, 23 nt, Artificial Sequence
  Chemically synthesized
caggcgugaaaccaauuccuauu

SEQ ID NO: 65208 - RNA, 23 nt, Artificial Sequence
  Chemically synthesized
aucauaguuggcuucuaaauacu

SEQ ID NO: 65209 - RNA, 23 nt, Artificial Sequence
  Chemically synthesized
ucauaguuggcuucuaaauacug

SEQ ID NO: 65210 - RNA, 23 nt, Artificial Sequence
  Chemically synthesized
caaaauuaaccgcauaagggcug

SEQ ID NO: 65211 - RNA, 23 nt, Artificial Sequence
  Chemically synthesized
agcaagguuucacaagacaaggc

SEQ ID NO: 65212 - RNA, 23 nt, Artificial Sequence
  Chemically synthesized
gcaagguuucacaagacaaggca

SEQ ID NO: 65213 - RNA, 23 nt, Artificial Sequence
  Chemically synthesized
caagguuucacaagacaaggcac

SEQ ID NO: 65214 - RNA, 23 nt, Artificial Sequence
  Chemically synthesized
accguggacuaacgagagaaccg

SEQ ID NO: 65215 - RNA, 23 nt, Artificial Sequence
  Chemically synthesized
ccguggacuaacgagagaaccga

SEQ ID NO: 65216 - RNA, 23 nt, Artificial Sequence
  Chemically synthesized
cguggacuaacgagagaaccgac

SEQ ID NO: 65217 - RNA, 23 nt, Artificial Sequence
  Chemically synthesized
ugccuucuucagguuucaccggc

SEQ ID NO: 65218 - RNA, 23 nt, Artificial Sequence
  Chemically synthesized
gccuucuucagguuucaccggcu

SEQ ID NO: 65219 - RNA, 23 nt, Artificial Sequence
  Chemically synthesized
ccuucuucagguuucaccggcuc

SEQ ID NO: 65220 - RNA, 23 nt, Artificial Sequence
  Chemically synthesized
cuucuucagguuucaccggcucc

SEQ ID NO: 65221 - RNA, 23 nt, Artificial Sequence
  Chemically synthesized
uucuucagguuucaccggcuccu

SEQ ID NO: 65222 - RNA, 23 nt, Artificial Sequence
  Chemically synthesized
aggcgaucauaaucuuccugccc

SEQ ID NO: 65223 - RNA, 23 nt, Artificial Sequence
  Chemically synthesized
uaguaguuggaaaaauuaacugg

SEQ ID NO: 65224 - RNA, 23 nt, Artificial Sequence
  Chemically synthesized
agcaugucuuuccacaggcucca

SEQ ID NO: 65225 - RNA, 23 nt, Artificial Sequence
  Chemically synthesized
gcaugucuuuccacaggcuccau

SEQ ID NO: 65226 - RNA, 23 nt, Artificial Sequence
  Chemically synthesized
caugucuuuccacaggcuccauc

SEQ ID NO: 65227 - RNA, 23 nt, Artificial Sequence
  Chemically synthesized
augucuuuccacaggcuccauca

SEQ ID NO: 65228 - RNA, 23 nt, Artificial Sequence
  Chemically synthesized
uucaaaauuaaccgcauaagggc

SEQ ID NO: 65229 - RNA, 23 nt, Artificial Sequence
  Chemically synthesized
ucaaaauuaaccgcauaagggcu

SEQ ID NO: 65230 - RNA, 23 nt, Artificial Sequence
  Chemically synthesized
cucacuccaucuuuggucuuugc

SEQ ID NO: 65231 - RNA, 23 nt, Artificial Sequence
  Chemically synthesized
uauucccaaccaggaugaugggc

SEQ ID NO: 65232 - RNA, 23 nt, Artificial Sequence
  Chemically synthesized
auucccaaccaggaugaugggca

SEQ ID NO: 65233 - RNA, 23 nt, Artificial Sequence
  Chemically synthesized
uucccaaccaggaugaugggcac

SEQ ID NO: 65234 - RNA, 23 nt, Artificial Sequence
  Chemically synthesized
aaaaaaaguuuagucagcuggag

SEQ ID NO: 65235 - RNA, 23 nt, Artificial Sequence
  Chemically synthesized
aaaaaaguuuagucagcuggaga

SEQ ID NO: 65236 - RNA, 23 nt, Artificial Sequence
  Chemically synthesized
aaaaaguuuagucagcuggagag

SEQ ID NO: 65237 - RNA, 23 nt, Artificial Sequence
  Chemically synthesized
aucagaaaaagugacaaaacggg

SEQ ID NO: 65238 - RNA, 23 nt, Artificial Sequence
  Chemically synthesized
ucagaaaaagugacaaaacggga

SEQ ID NO: 65239 - RNA, 23 nt, Artificial Sequence
  Chemically synthesized
cagaaaaagugacaaaacgggaa

SEQ ID NO: 65240 - RNA, 23 nt, Artificial Sequence
  Chemically synthesized
agaaaaagugacaaaacgggaau

SEQ ID NO: 65241 - RNA, 23 nt, Artificial Sequence
  Chemically synthesized
gaaaaagugacaaaacgggaauu

SEQ ID NO: 65242 - RNA, 23 nt, Artificial Sequence
  Chemically synthesized
augaaaccacagaacuguaacuc

SEQ ID NO: 65243 - RNA, 23 nt, Artificial Sequence
  Chemically synthesized
ugaaaccacagaacuguaacucu

SEQ ID NO: 65244 - RNA, 23 nt, Artificial Sequence
  Chemically synthesized
gaaaccacagaacuguaacucug

SEQ ID NO: 65245 - RNA, 23 nt, Artificial Sequence
  Chemically synthesized
gcagugucaaaaggacccuggug

SEQ ID NO: 65246 - RNA, 23 nt, Artificial Sequence
  Chemically synthesized
cagugucaaaaggacccuggugg

SEQ ID NO: 65247 - RNA, 23 nt, Artificial Sequence
  Chemically synthesized
agugucaaaaggacccugguggg

SEQ ID NO: 65248 - RNA, 23 nt, Artificial Sequence
  Chemically synthesized
accucucucacuccaucuuuggu

SEQ ID NO: 65249 - RNA, 23 nt, Artificial Sequence
  Chemically synthesized
gcugugucccacaaagccaacuc

SEQ ID NO: 65250 - RNA, 23 nt, Artificial Sequence
  Chemically synthesized
aguucucaaacacugugggcaca

SEQ ID NO: 65251 - RNA, 23 nt, Artificial Sequence
  Chemically synthesized
guucucaaacacugugggcacau

SEQ ID NO: 65252 - RNA, 23 nt, Artificial Sequence
  Chemically synthesized
uucucaaacacugugggcacaua

SEQ ID NO: 65253 - RNA, 23 nt, Artificial Sequence
  Chemically synthesized
gagggaaccuggauacagugagg

SEQ ID NO: 65254 - RNA, 23 nt, Artificial Sequence
  Chemically synthesized
agggaaccuggauacagugagga

SEQ ID NO: 65255 - RNA, 23 nt, Artificial Sequence
  Chemically synthesized
gggaaccuggauacagugaggag

SEQ ID NO: 65256 - RNA, 23 nt, Artificial Sequence
  Chemically synthesized
ggaaccuggauacagugaggaga

SEQ ID NO: 65257 - RNA, 23 nt, Artificial Sequence
  Chemically synthesized
gaaccuggauacagugaggagaa

SEQ ID NO: 65258 - RNA, 23 nt, Artificial Sequence
  Chemically synthesized
uauggccaucuuuuaucagaaaa

SEQ ID NO: 65259 - RNA, 23 nt, Artificial Sequence
  Chemically synthesized
auggccaucuuuuaucagaaaaa

SEQ ID NO: 65260 - RNA, 23 nt, Artificial Sequence
  Chemically synthesized
guagcaagaugacuucugauuug

SEQ ID NO: 65261 - RNA, 23 nt, Artificial Sequence
  Chemically synthesized
uagcaagaugacuucugauuugu

SEQ ID NO: 65262 - RNA, 23 nt, Artificial Sequence
  Chemically synthesized
agcaagaugacuucugauuugua

SEQ ID NO: 65263 - RNA, 23 nt, Artificial Sequence
  Chemically synthesized
gcaagaugacuucugauuuguaa

SEQ ID NO: 65264 - RNA, 23 nt, Artificial Sequence
  Chemically synthesized
caagaugacuucugauuuguaau

SEQ ID NO: 65265 - RNA, 23 nt, Artificial Sequence
  Chemically synthesized
uaaccgcauaagggcugugcuug

SEQ ID NO: 65266 - RNA, 23 nt, Artificial Sequence
  Chemically synthesized
ucacuccaucuuuggucuuugcu

SEQ ID NO: 65267 - RNA, 23 nt, Artificial Sequence
  Chemically synthesized
cacuccaucuuuggucuuugcug

SEQ ID NO: 65268 - RNA, 23 nt, Artificial Sequence
  Chemically synthesized
acuccaucuuuggucuuugcuga

SEQ ID NO: 65269 - RNA, 23 nt, Artificial Sequence
  Chemically synthesized
cuccaucuuuggucuuugcugaa

SEQ ID NO: 65270 - RNA, 23 nt, Artificial Sequence
  Chemically synthesized
ugccucaggcgugaaaccaauuc

SEQ ID NO: 65271 - RNA, 23 nt, Artificial Sequence
  Chemically synthesized
caacaaaaucuguuacggaguaa

SEQ ID NO: 65272 - RNA, 23 nt, Artificial Sequence
  Chemically synthesized
aacaaaaucuguuacggaguaaa

SEQ ID NO: 65273 - RNA, 23 nt, Artificial Sequence
  Chemically synthesized
acaaaaucuguuacggaguaaag

SEQ ID NO: 65274 - RNA, 23 nt, Artificial Sequence
  Chemically synthesized
caaaaucuguuacggaguaaagc

SEQ ID NO: 65275 - RNA, 23 nt, Artificial Sequence
  Chemically synthesized
aaaaucuguuacggaguaaagcc

SEQ ID NO: 65276 - RNA, 23 nt, Artificial Sequence
  Chemically synthesized
uuaagaaauuccuugaauuagcg

SEQ ID NO: 65277 - RNA, 23 nt, Artificial Sequence
  Chemically synthesized
uaagaaauuccuugaauuagcgc

SEQ ID NO: 65278 - RNA, 23 nt, Artificial Sequence
  Chemically synthesized
uugaauuagcgccugguguguca

SEQ ID NO: 65279 - RNA, 23 nt, Artificial Sequence
  Chemically synthesized
ugaauuagcgccuggugugucag

SEQ ID NO: 65280 - RNA, 23 nt, Artificial Sequence
  Chemically synthesized
gaauuagcgccuggugugucagg

SEQ ID NO: 65281 - RNA, 23 nt, Artificial Sequence
  Chemically synthesized
aauuagcgccuggugugucaggu

SEQ ID NO: 65282 - RNA, 23 nt, Artificial Sequence
  Chemically synthesized
auuagcgccuggugugucaggug

SEQ ID NO: 65283 - RNA, 23 nt, Artificial Sequence
  Chemically synthesized
aagaugacuucugauuuguaauc

SEQ ID NO: 65284 - RNA, 23 nt, Artificial Sequence
  Chemically synthesized
aaccuggauacagugaggagaaa

SEQ ID NO: 65285 - RNA, 23 nt, Artificial Sequence
  Chemically synthesized
ugaauuagagccagaugcuuaag

SEQ ID NO: 65286 - RNA, 23 nt, Artificial Sequence
  Chemically synthesized
gaauuagagccagaugcuuaagu

SEQ ID NO: 65287 - RNA, 23 nt, Artificial Sequence
  Chemically synthesized
aauuagagccagaugcuuaaguc

SEQ ID NO: 65288 - RNA, 23 nt, Artificial Sequence
  Chemically synthesized
auuagagccagaugcuuaagucc

SEQ ID NO: 65289 - RNA, 23 nt, Artificial Sequence
  Chemically synthesized
aaaaagugacaaaacgggaauuu

SEQ ID NO: 65290 - RNA, 23 nt, Artificial Sequence
  Chemically synthesized
ucucuuucuagaaagaagcaaga

SEQ ID NO: 65291 - RNA, 23 nt, Artificial Sequence
  Chemically synthesized
gaggagggcuguuagagcagugu

SEQ ID NO: 65292 - RNA, 23 nt, Artificial Sequence
  Chemically synthesized
aggagggcuguuagagcaguguc

SEQ ID NO: 65293 - RNA, 23 nt, Artificial Sequence
  Chemically synthesized
ggagggcuguuagagcaguguca

SEQ ID NO: 65294 - RNA, 23 nt, Artificial Sequence
  Chemically synthesized
gagggcuguuagagcagugucaa

SEQ ID NO: 65295 - RNA, 23 nt, Artificial Sequence
  Chemically synthesized
agggcuguuagagcagugucaaa

SEQ ID NO: 65296 - RNA, 23 nt, Artificial Sequence
  Chemically synthesized
gccauugcucaggcaacgaaucc

SEQ ID NO: 65297 - RNA, 23 nt, Artificial Sequence
  Chemically synthesized
ccauugcucaggcaacgaauccg

SEQ ID NO: 65298 - RNA, 23 nt, Artificial Sequence
  Chemically synthesized
cauugcucaggcaacgaauccga

SEQ ID NO: 65299 - RNA, 23 nt, Artificial Sequence
  Chemically synthesized
auugcucaggcaacgaauccgag

SEQ ID NO: 65300 - RNA, 23 nt, Artificial Sequence
  Chemically synthesized
uugcucaggcaacgaauccgagu

SEQ ID NO: 65301 - RNA, 23 nt, Artificial Sequence
  Chemically synthesized
cuaacgagagaaccgacggagga

SEQ ID NO: 65302 - RNA, 23 nt, Artificial Sequence
  Chemically synthesized
uaacgagagaaccgacggaggac

SEQ ID NO: 65303 - RNA, 23 nt, Artificial Sequence
  Chemically synthesized
aagagcacugugaauuagagcca

SEQ ID NO: 65304 - RNA, 23 nt, Artificial Sequence
  Chemically synthesized
agagcacugugaauuagagccag

SEQ ID NO: 65305 - RNA, 23 nt, Artificial Sequence
  Chemically synthesized
gugagacagguuaugccaucuuc

SEQ ID NO: 65306 - RNA, 23 nt, Artificial Sequence
  Chemically synthesized
ugagacagguuaugccaucuucc

SEQ ID NO: 65307 - RNA, 23 nt, Artificial Sequence
  Chemically synthesized
gagacagguuaugccaucuucca

SEQ ID NO: 65308 - RNA, 23 nt, Artificial Sequence
  Chemically synthesized
agacagguuaugccaucuuccaa

SEQ ID NO: 65309 - RNA, 23 nt, Artificial Sequence
  Chemically synthesized
gacagguuaugccaucuuccaaa

SEQ ID NO: 65310 - RNA, 23 nt, Artificial Sequence
  Chemically synthesized
acagguuaugccaucuuccaaag

SEQ ID NO: 65311 - RNA, 23 nt, Artificial Sequence
  Chemically synthesized
aaaagugacaaaacgggaauuua

SEQ ID NO: 65312 - RNA, 23 nt, Artificial Sequence
  Chemically synthesized
acuguaacucugccacagcugca

SEQ ID NO: 65313 - RNA, 23 nt, Artificial Sequence
  Chemically synthesized
cuguaacucugccacagcugcau

SEQ ID NO: 65314 - RNA, 23 nt, Artificial Sequence
  Chemically synthesized
uguaacucugccacagcugcaug

SEQ ID NO: 65315 - RNA, 23 nt, Artificial Sequence
  Chemically synthesized
guaacucugccacagcugcauga

SEQ ID NO: 65316 - RNA, 23 nt, Artificial Sequence
  Chemically synthesized
uaacucugccacagcugcaugaa

SEQ ID NO: 65317 - RNA, 23 nt, Artificial Sequence
  Chemically synthesized
augccaacaaaaucuguuacgga

SEQ ID NO: 65318 - RNA, 23 nt, Artificial Sequence
  Chemically synthesized
ugccaacaaaaucuguuacggag

SEQ ID NO: 65319 - RNA, 23 nt, Artificial Sequence
  Chemically synthesized
agauaauaggcaggacauguuag

SEQ ID NO: 65320 - RNA, 23 nt, Artificial Sequence
  Chemically synthesized
gauaauaggcaggacauguuagu

SEQ ID NO: 65321 - RNA, 23 nt, Artificial Sequence
  Chemically synthesized
auaauaggcaggacauguuaguu

SEQ ID NO: 65322 - RNA, 23 nt, Artificial Sequence
  Chemically synthesized
uaauaggcaggacauguuaguua

SEQ ID NO: 65323 - RNA, 23 nt, Artificial Sequence
  Chemically synthesized
guuaagaaauuccuugaauuagc

SEQ ID NO: 65324 - RNA, 23 nt, Artificial Sequence
  Chemically synthesized
cuucaaaauuaaccgcauaaggg

SEQ ID NO: 65325 - RNA, 23 nt, Artificial Sequence
  Chemically synthesized
auuccgaagauccuucuuauucc

SEQ ID NO: 65326 - RNA, 23 nt, Artificial Sequence
  Chemically synthesized
uuccgaagauccuucuuauuccc

SEQ ID NO: 65327 - RNA, 23 nt, Artificial Sequence
  Chemically synthesized
uccgaagauccuucuuauuccca

SEQ ID NO: 65328 - RNA, 23 nt, Artificial Sequence
  Chemically synthesized
ccgaagauccuucuuauucccaa

SEQ ID NO: 65329 - RNA, 23 nt, Artificial Sequence
  Chemically synthesized
cgaagauccuucuuauucccaac

SEQ ID NO: 65330 - RNA, 23 nt, Artificial Sequence
  Chemically synthesized
ccacuuuucugggauguuuucua

SEQ ID NO: 65331 - RNA, 23 nt, Artificial Sequence
  Chemically synthesized
cacuuuucugggauguuuucuaa

SEQ ID NO: 65332 - RNA, 23 nt, Artificial Sequence
  Chemically synthesized
gagcacugugaauuagagccaga

SEQ ID NO: 65333 - RNA, 23 nt, Artificial Sequence
  Chemically synthesized
agcacugugaauuagagccagau

SEQ ID NO: 65334 - RNA, 23 nt, Artificial Sequence
  Chemically synthesized
gcacugugaauuagagccagaug

SEQ ID NO: 65335 - RNA, 23 nt, Artificial Sequence
  Chemically synthesized
gugucuaauugccucaggcguga

SEQ ID NO: 65336 - RNA, 23 nt, Artificial Sequence
  Chemically synthesized
ugucuaauugccucaggcgugaa

SEQ ID NO: 65337 - RNA, 23 nt, Artificial Sequence
  Chemically synthesized
gucuaauugccucaggcgugaaa

SEQ ID NO: 65338 - RNA, 23 nt, Artificial Sequence
  Chemically synthesized
ucuaauugccucaggcgugaaac

SEQ ID NO: 65339 - RNA, 23 nt, Artificial Sequence
  Chemically synthesized
cuaauugccucaggcgugaaacc

SEQ ID NO: 65340 - RNA, 23 nt, Artificial Sequence
  Chemically synthesized
uaucagaaaaagugacaaaacgg

SEQ ID NO: 65341 - RNA, 23 nt, Artificial Sequence
  Chemically synthesized
gcuuuucugguugagcccauuuu

SEQ ID NO: 65342 - RNA, 23 nt, Artificial Sequence
  Chemically synthesized
cuuuucugguugagcccauuuuc

SEQ ID NO: 65343 - RNA, 23 nt, Artificial Sequence
  Chemically synthesized
uuuucugguugagcccauuuuca

SEQ ID NO: 65344 - RNA, 23 nt, Artificial Sequence
  Chemically synthesized
uuucugguugagcccauuuucaa

SEQ ID NO: 65345 - RNA, 23 nt, Artificial Sequence
  Chemically synthesized
uucugguugagcccauuuucaaa

SEQ ID NO: 65346 - RNA, 23 nt, Artificial Sequence
  Chemically synthesized
uguuacggaguaaagcccugaag

SEQ ID NO: 65347 - RNA, 23 nt, Artificial Sequence
  Chemically synthesized
guuacggaguaaagcccugaagu

SEQ ID NO: 65348 - RNA, 23 nt, Artificial Sequence
  Chemically synthesized
agagcagcucucguagccauuuc

SEQ ID NO: 65349 - RNA, 23 nt, Artificial Sequence
  Chemically synthesized
gagcagcucucguagccauuuca

SEQ ID NO: 65350 - RNA, 23 nt, Artificial Sequence
  Chemically synthesized
agcagcucucguagccauuucaa

SEQ ID NO: 65351 - RNA, 23 nt, Artificial Sequence
  Chemically synthesized
gcagcucucguagccauuucaaa

SEQ ID NO: 65352 - RNA, 23 nt, Artificial Sequence
  Chemically synthesized
cagcucucguagccauuucaaaa

SEQ ID NO: 65353 - RNA, 23 nt, Artificial Sequence
  Chemically synthesized
cugccuucuucagguuucaccgg

SEQ ID NO: 65354 - RNA, 23 nt, Artificial Sequence
  Chemically synthesized
ucuucagguuucaccggcuccug

SEQ ID NO: 65355 - RNA, 23 nt, Artificial Sequence
  Chemically synthesized
ucauuccgaagauccuucuuauu

SEQ ID NO: 65356 - RNA, 23 nt, Artificial Sequence
  Chemically synthesized
cauuccgaagauccuucuuauuc

SEQ ID NO: 65357 - RNA, 23 nt, Artificial Sequence
  Chemically synthesized
ugggcacguugggacagaaaugc

SEQ ID NO: 65358 - RNA, 23 nt, Artificial Sequence
  Chemically synthesized
gggcacguugggacagaaaugcu

SEQ ID NO: 65359 - RNA, 23 nt, Artificial Sequence
  Chemically synthesized
ggcacguugggacagaaaugcuu

SEQ ID NO: 65360 - RNA, 23 nt, Artificial Sequence
  Chemically synthesized
gcacguugggacagaaaugcuug

SEQ ID NO: 65361 - RNA, 23 nt, Artificial Sequence
  Chemically synthesized
cacguugggacagaaaugcuuga

SEQ ID NO: 65362 - RNA, 23 nt, Artificial Sequence
  Chemically synthesized
cggguagcugaagaccagaccgu

SEQ ID NO: 65363 - RNA, 23 nt, Artificial Sequence
  Chemically synthesized
ggguagcugaagaccagaccgug

SEQ ID NO: 65364 - RNA, 23 nt, Artificial Sequence
  Chemically synthesized
gguagcugaagaccagaccgugg

SEQ ID NO: 65365 - RNA, 23 nt, Artificial Sequence
  Chemically synthesized
guagcugaagaccagaccgugga

SEQ ID NO: 65366 - RNA, 23 nt, Artificial Sequence
  Chemically synthesized
uagcugaagaccagaccguggac

SEQ ID NO: 65367 - RNA, 23 nt, Artificial Sequence
  Chemically synthesized
uuagagccagaugcuuaagucca

SEQ ID NO: 65368 - RNA, 23 nt, Artificial Sequence
  Chemically synthesized
uagagccagaugcuuaaguccag

SEQ ID NO: 65369 - RNA, 23 nt, Artificial Sequence
  Chemically synthesized
gagccagaugcuuaaguccaggu

SEQ ID NO: 65370 - RNA, 23 nt, Artificial Sequence
  Chemically synthesized
agccagaugcuuaaguccaggug

SEQ ID NO: 65371 - RNA, 23 nt, Artificial Sequence
  Chemically synthesized
gccagaugcuuaaguccagguga

SEQ ID NO: 65372 - RNA, 23 nt, Artificial Sequence
  Chemically synthesized
ccagaugcuuaaguccaggugag

SEQ ID NO: 65373 - RNA, 23 nt, Artificial Sequence
  Chemically synthesized
cagaugcuuaaguccaggugaga

SEQ ID NO: 65374 - RNA, 23 nt, Artificial Sequence
  Chemically synthesized
agaugcuuaaguccaggugagac

SEQ ID NO: 65375 - RNA, 23 nt, Artificial Sequence
  Chemically synthesized
gaugcuuaaguccaggugagaca

SEQ ID NO: 65376 - RNA, 23 nt, Artificial Sequence
  Chemically synthesized
augcuuaaguccaggugagacag

SEQ ID NO: 65377 - RNA, 23 nt, Artificial Sequence
  Chemically synthesized
gcuuaaguccaggugagacaggu

SEQ ID NO: 65378 - RNA, 23 nt, Artificial Sequence
  Chemically synthesized
cuuaaguccaggugagacagguu

SEQ ID NO: 65379 - RNA, 23 nt, Artificial Sequence
  Chemically synthesized
uuaaguccaggugagacagguua

SEQ ID NO: 65380 - RNA, 23 nt, Artificial Sequence
  Chemically synthesized
uaaguccaggugagacagguuau

SEQ ID NO: 65381 - RNA, 23 nt, Artificial Sequence
  Chemically synthesized
aaguccaggugagacagguuaug

SEQ ID NO: 65382 - RNA, 23 nt, Artificial Sequence
  Chemically synthesized
ccaauacacuuucuuugaggaug

SEQ ID NO: 65383 - RNA, 23 nt, Artificial Sequence
  Chemically synthesized
caauacacuuucuuugaggauga

SEQ ID NO: 65384 - RNA, 23 nt, Artificial Sequence
  Chemically synthesized
aauacacuuucuuugaggaugac

SEQ ID NO: 65385 - RNA, 23 nt, Artificial Sequence
  Chemically synthesized
gaacuugggcuuuucugguugag

SEQ ID NO: 65386 - RNA, 23 nt, Artificial Sequence
  Chemically synthesized
aacuugggcuuuucugguugagc

SEQ ID NO: 65387 - RNA, 23 nt, Artificial Sequence
  Chemically synthesized
gccaacaaaaucuguuacggagu

SEQ ID NO: 65388 - RNA, 23 nt, Artificial Sequence
  Chemically synthesized
ccaacaaaaucuguuacggagua

SEQ ID NO: 65389 - RNA, 23 nt, Artificial Sequence
  Chemically synthesized
uuacggaguaaagcccugaagug

SEQ ID NO: 65390 - RNA, 23 nt, Artificial Sequence
  Chemically synthesized
ucucugccuucuucagguuucac

SEQ ID NO: 65391 - RNA, 23 nt, Artificial Sequence
  Chemically synthesized
cucugccuucuucagguuucacc

SEQ ID NO: 65392 - RNA, 23 nt, Artificial Sequence
  Chemically synthesized
ucugccuucuucagguuucaccg

SEQ ID NO: 65393 - RNA, 23 nt, Artificial Sequence
  Chemically synthesized
acguugggacagaaaugcuugac

SEQ ID NO: 65394 - RNA, 23 nt, Artificial Sequence
  Chemically synthesized
cguugggacagaaaugcuugacu

SEQ ID NO: 65395 - RNA, 23 nt, Artificial Sequence
  Chemically synthesized
guugggacagaaaugcuugacuu

SEQ ID NO: 65396 - RNA, 23 nt, Artificial Sequence
  Chemically synthesized
uugggacagaaaugcuugacuuc

SEQ ID NO: 65397 - RNA, 23 nt, Artificial Sequence
  Chemically synthesized
aauuaacugguacagaaaaaaag

SEQ ID NO: 65398 - RNA, 23 nt, Artificial Sequence
  Chemically synthesized
auuaacugguacagaaaaaaagu

SEQ ID NO: 65399 - RNA, 23 nt, Artificial Sequence
  Chemically synthesized
uuaacugguacagaaaaaaaguu

SEQ ID NO: 65400 - RNA, 23 nt, Artificial Sequence
  Chemically synthesized
uaacugguacagaaaaaaaguuu

SEQ ID NO: 65401 - RNA, 23 nt, Artificial Sequence
  Chemically synthesized
aacugguacagaaaaaaaguuua

SEQ ID NO: 65402 - RNA, 23 nt, Artificial Sequence
  Chemically synthesized
ugcuuaaguccaggugagacagg

SEQ ID NO: 65403 - RNA, 23 nt, Artificial Sequence
  Chemically synthesized
aggugagacagguuaugccaucu

SEQ ID NO: 65404 - RNA, 23 nt, Artificial Sequence
  Chemically synthesized
ggugagacagguuaugccaucuu

SEQ ID NO: 65405 - RNA, 23 nt, Artificial Sequence
  Chemically synthesized
aggcgugaaaccaauuccuauuu

SEQ ID NO: 65406 - RNA, 23 nt, Artificial Sequence
  Chemically synthesized
gaguaaagcccugaaguggugac

SEQ ID NO: 65407 - RNA, 23 nt, Artificial Sequence
  Chemically synthesized
aguaaagcccugaaguggugacu

SEQ ID NO: 65408 - RNA, 23 nt, Artificial Sequence
  Chemically synthesized
guaaagcccugaaguggugacuc

SEQ ID NO: 65409 - RNA, 23 nt, Artificial Sequence
  Chemically synthesized
uaaagcccugaaguggugacuca

SEQ ID NO: 65410 - RNA, 23 nt, Artificial Sequence
  Chemically synthesized
aaagcccugaaguggugacucac

SEQ ID NO: 65411 - RNA, 23 nt, Artificial Sequence
  Chemically synthesized
acagauaauaggcaggacauguu

SEQ ID NO: 65412 - RNA, 23 nt, Artificial Sequence
  Chemically synthesized
cagauaauaggcaggacauguua

SEQ ID NO: 65413 - RNA, 23 nt, Artificial Sequence
  Chemically synthesized
ugguagcaagaugacuucugauu

SEQ ID NO: 65414 - RNA, 23 nt, Artificial Sequence
  Chemically synthesized
gguagcaagaugacuucugauuu

SEQ ID NO: 65415 - RNA, 23 nt, Artificial Sequence
  Chemically synthesized
ugucuuuccacaggcuccaucac

SEQ ID NO: 65416 - RNA, 23 nt, Artificial Sequence
  Chemically synthesized
accgcauaagggcugugcuugca

SEQ ID NO: 65417 - RNA, 23 nt, Artificial Sequence
  Chemically synthesized
ccgcauaagggcugugcuugcag

SEQ ID NO: 65418 - RNA, 23 nt, Artificial Sequence
  Chemically synthesized
cgcauaagggcugugcuugcagc

SEQ ID NO: 65419 - RNA, 23 nt, Artificial Sequence
  Chemically synthesized
gcauaagggcugugcuugcagca

SEQ ID NO: 65420 - RNA, 23 nt, Artificial Sequence
  Chemically synthesized
cauaagggcugugcuugcagcaa

SEQ ID NO: 65421 - RNA, 23 nt, Artificial Sequence
  Chemically synthesized
uccaucuuuggucuuugcugaac

SEQ ID NO: 65422 - RNA, 23 nt, Artificial Sequence
  Chemically synthesized
ccaucuuuggucuuugcugaaca

SEQ ID NO: 65423 - RNA, 23 nt, Artificial Sequence
  Chemically synthesized
aucaccaguuucuuccggauggc

SEQ ID NO: 65424 - RNA, 23 nt, Artificial Sequence
  Chemically synthesized
aaacacugugggcacauacaccu

SEQ ID NO: 65425 - RNA, 23 nt, Artificial Sequence
  Chemically synthesized
aacacugugggcacauacaccuc

SEQ ID NO: 65426 - RNA, 23 nt, Artificial Sequence
  Chemically synthesized
acacugugggcacauacaccucu

SEQ ID NO: 65427 - RNA, 23 nt, Artificial Sequence
  Chemically synthesized
cacugugggcacauacaccucug

SEQ ID NO: 65428 - RNA, 23 nt, Artificial Sequence
  Chemically synthesized
acugugggcacauacaccucugg

SEQ ID NO: 65429 - RNA, 23 nt, Artificial Sequence
  Chemically synthesized
gaacuguaacucugccacagcug

SEQ ID NO: 65430 - RNA, 23 nt, Artificial Sequence
  Chemically synthesized
aacuguaacucugccacagcugc

SEQ ID NO: 65431 - RNA, 23 nt, Artificial Sequence
  Chemically synthesized
cagcugcaugaacuugggcuuuu

SEQ ID NO: 65432 - RNA, 23 nt, Artificial Sequence
  Chemically synthesized
agcugcaugaacuugggcuuuuc

SEQ ID NO: 65433 - RNA, 23 nt, Artificial Sequence
  Chemically synthesized
ggaguaaagcccugaagugguga

SEQ ID NO: 65434 - RNA, 23 nt, Artificial Sequence
  Chemically synthesized
cucuuucuagaaagaagcaagaa

SEQ ID NO: 65435 - RNA, 23 nt, Artificial Sequence
  Chemically synthesized
ucuuucuagaaagaagcaagaag

SEQ ID NO: 65436 - RNA, 23 nt, Artificial Sequence
  Chemically synthesized
cuuucuagaaagaagcaagaagu

SEQ ID NO: 65437 - RNA, 23 nt, Artificial Sequence
  Chemically synthesized
uuucuagaaagaagcaagaaguu

SEQ ID NO: 65438 - RNA, 23 nt, Artificial Sequence
  Chemically synthesized
auaagggcugugcuugcagcaag

SEQ ID NO: 65439 - RNA, 23 nt, Artificial Sequence
  Chemically synthesized
aaaaguuuagucagcuggagaga

SEQ ID NO: 65440 - RNA, 23 nt, Artificial Sequence
  Chemically synthesized
aaaguuuagucagcuggagagaa

SEQ ID NO: 65441 - RNA, 23 nt, Artificial Sequence
  Chemically synthesized
aguuuagucagcuggagagaaga

SEQ ID NO: 65442 - RNA, 23 nt, Artificial Sequence
  Chemically synthesized
gacaguauuaggaaauccaauua

SEQ ID NO: 65443 - RNA, 23 nt, Artificial Sequence
  Chemically synthesized
ucaccaguuucuuccggauggca

SEQ ID NO: 65444 - RNA, 23 nt, Artificial Sequence
  Chemically synthesized
caccaguuucuuccggauggcag

SEQ ID NO: 65445 - RNA, 23 nt, Artificial Sequence
  Chemically synthesized
accaguuucuuccggauggcagc

SEQ ID NO: 65446 - RNA, 23 nt, Artificial Sequence
  Chemically synthesized
auacacuuucuuugaggaugaca

SEQ ID NO: 65447 - RNA, 23 nt, Artificial Sequence
  Chemically synthesized
aagcccugaaguggugacucacc

SEQ ID NO: 65448 - RNA, 23 nt, Artificial Sequence
  Chemically synthesized
ggugacucaccagaguaccuugc

SEQ ID NO: 65449 - RNA, 23 nt, Artificial Sequence
  Chemically synthesized
gugacucaccagaguaccuugca

SEQ ID NO: 65450 - RNA, 23 nt, Artificial Sequence
  Chemically synthesized
agcucucguagccauuucaaaaa

SEQ ID NO: 65451 - RNA, 23 nt, Artificial Sequence
  Chemically synthesized
ccuucuuauucccaaccaggaug

SEQ ID NO: 65452 - RNA, 23 nt, Artificial Sequence
  Chemically synthesized
gcugucgauggaaaaacacauca

SEQ ID NO: 65453 - RNA, 23 nt, Artificial Sequence
  Chemically synthesized
cugucgauggaaaaacacaucag

SEQ ID NO: 65454 - RNA, 23 nt, Artificial Sequence
  Chemically synthesized
ugucgauggaaaaacacaucagu

SEQ ID NO: 65455 - RNA, 23 nt, Artificial Sequence
  Chemically synthesized
gucgauggaaaaacacaucagua

SEQ ID NO: 65456 - RNA, 23 nt, Artificial Sequence
  Chemically synthesized
ucgauggaaaaacacaucaguau

SEQ ID NO: 65457 - RNA, 23 nt, Artificial Sequence
  Chemically synthesized
caucgguaucuggguaggagagg

SEQ ID NO: 65458 - RNA, 23 nt, Artificial Sequence
  Chemically synthesized
aucgguaucuggguaggagaggg

SEQ ID NO: 65459 - RNA, 23 nt, Artificial Sequence
  Chemically synthesized
agagccagaugcuuaaguccagg

SEQ ID NO: 65460 - RNA, 23 nt, Artificial Sequence
  Chemically synthesized
uuaucagaaaaagugacaaaacg

SEQ ID NO: 65461 - RNA, 23 nt, Artificial Sequence
  Chemically synthesized
uacggaguaaagcccugaagugg

SEQ ID NO: 65462 - RNA, 23 nt, Artificial Sequence
  Chemically synthesized
acggaguaaagcccugaaguggu

SEQ ID NO: 65463 - RNA, 23 nt, Artificial Sequence
  Chemically synthesized
cggaguaaagcccugaaguggug

SEQ ID NO: 65464 - RNA, 23 nt, Artificial Sequence
  Chemically synthesized
ccugaaguggugacucaccagag

SEQ ID NO: 65465 - RNA, 23 nt, Artificial Sequence
  Chemically synthesized
cugaaguggugacucaccagagu

SEQ ID NO: 65466 - RNA, 23 nt, Artificial Sequence
  Chemically synthesized
ugaaguggugacucaccagagua

SEQ ID NO: 65467 - RNA, 23 nt, Artificial Sequence
  Chemically synthesized
gaaguggugacucaccagaguac

SEQ ID NO: 65468 - RNA, 23 nt, Artificial Sequence
  Chemically synthesized
aaguggugacucaccagaguacc

SEQ ID NO: 65469 - RNA, 23 nt, Artificial Sequence
  Chemically synthesized
gcuugcagagcagcucucguagc

SEQ ID NO: 65470 - RNA, 23 nt, Artificial Sequence
  Chemically synthesized
cuugcagagcagcucucguagcc

SEQ ID NO: 65471 - RNA, 23 nt, Artificial Sequence
  Chemically synthesized
uugcagagcagcucucguagcca

SEQ ID NO: 65472 - RNA, 23 nt, Artificial Sequence
  Chemically synthesized
ucucaaacacugugggcacauac

SEQ ID NO: 65473 - RNA, 23 nt, Artificial Sequence
  Chemically synthesized
cucaaacacugugggcacauaca

SEQ ID NO: 65474 - RNA, 23 nt, Artificial Sequence
  Chemically synthesized
ucaaacacugugggcacauacac

SEQ ID NO: 65475 - RNA, 23 nt, Artificial Sequence
  Chemically synthesized
caaacacugugggcacauacacc

SEQ ID NO: 65476 - RNA, 23 nt, Artificial Sequence
  Chemically synthesized
cuugaauuagcgccugguguguc

SEQ ID NO: 65477 - RNA, 23 nt, Artificial Sequence
  Chemically synthesized
cugugggcacauacaccucuggg

SEQ ID NO: 65478 - RNA, 23 nt, Artificial Sequence
  Chemically synthesized
ugugggcacauacaccucuggga

SEQ ID NO: 65479 - RNA, 23 nt, Artificial Sequence
  Chemically synthesized
ccuugaauuagcgccuggugugu

SEQ ID NO: 65480 - RNA, 23 nt, Artificial Sequence
  Chemically synthesized
cuccugcuucaucuuggcuagcu

SEQ ID NO: 65481 - RNA, 23 nt, Artificial Sequence
  Chemically synthesized
uccugcuucaucuuggcuagcuc

SEQ ID NO: 65482 - RNA, 23 nt, Artificial Sequence
  Chemically synthesized
ggcugucgauggaaaaacacauc

SEQ ID NO: 65483 - RNA, 23 nt, Artificial Sequence
  Chemically synthesized
guuuagucagcuggagagaagag

SEQ ID NO: 65484 - RNA, 23 nt, Artificial Sequence
  Chemically synthesized
uuuagucagcuggagagaagaga

SEQ ID NO: 65485 - RNA, 23 nt, Artificial Sequence
  Chemically synthesized
uuagucagcuggagagaagagag

SEQ ID NO: 65486 - RNA, 23 nt, Artificial Sequence
  Chemically synthesized
aguggugacucaccagaguaccu

SEQ ID NO: 65487 - RNA, 23 nt, Artificial Sequence
  Chemically synthesized
guggugacucaccagaguaccuu

SEQ ID NO: 65488 - RNA, 23 nt, Artificial Sequence
  Chemically synthesized
uggugacucaccagaguaccuug

SEQ ID NO: 65489 - RNA, 23 nt, Artificial Sequence
  Chemically synthesized
caccagaguaccuugcagcugac

SEQ ID NO: 65490 - RNA, 23 nt, Artificial Sequence
  Chemically synthesized
accagaguaccuugcagcugaca

SEQ ID NO: 65491 - RNA, 23 nt, Artificial Sequence
  Chemically synthesized
ccagaguaccuugcagcugacag

SEQ ID NO: 65492 - RNA, 23 nt, Artificial Sequence
  Chemically synthesized
cagaguaccuugcagcugacaga

SEQ ID NO: 65493 - RNA, 23 nt, Artificial Sequence
  Chemically synthesized
acuugggcuuuucugguugagcc

SEQ ID NO: 65494 - RNA, 23 nt, Artificial Sequence
  Chemically synthesized
agcccugaaguggugacucacca

SEQ ID NO: 65495 - RNA, 23 nt, Artificial Sequence
  Chemically synthesized
gcccugaaguggugacucaccag

SEQ ID NO: 65496 - RNA, 23 nt, Artificial Sequence
  Chemically synthesized
cccugaaguggugacucaccaga

SEQ ID NO: 65497 - RNA, 23 nt, Artificial Sequence
  Chemically synthesized
uccacuuuucugggauguuuucu

SEQ ID NO: 65498 - RNA, 23 nt, Artificial Sequence
  Chemically synthesized
cuugggcuuuucugguugagccc

SEQ ID NO: 65499 - RNA, 23 nt, Artificial Sequence
  Chemically synthesized
uugggcuuuucugguugagccca

SEQ ID NO: 65500 - RNA, 23 nt, Artificial Sequence
  Chemically synthesized
aacucugccacagcugcaugaac

SEQ ID NO: 65501 - RNA, 23 nt, Artificial Sequence
  Chemically synthesized
gacaucguuaauaaucauaguug

SEQ ID NO: 65502 - RNA, 23 nt, Artificial Sequence
  Chemically synthesized
aauccuguuugccauaucucugc

SEQ ID NO: 65503 - RNA, 23 nt, Artificial Sequence
  Chemically synthesized
ucugacuuuauuuccaaauacac

SEQ ID NO: 65504 - RNA, 23 nt, Artificial Sequence
  Chemically synthesized
uucuucccacgucuagcuugcag

SEQ ID NO: 65505 - RNA, 23 nt, Artificial Sequence
  Chemically synthesized
auacauuaaguggcacuaauuac

SEQ ID NO: 65506 - RNA, 23 nt, Artificial Sequence
  Chemically synthesized
cuaauuacacaguaacuauaagg

SEQ ID NO: 65507 - RNA, 23 nt, Artificial Sequence
  Chemically synthesized
auccuguuugccauaucucugcc

SEQ ID NO: 65508 - RNA, 23 nt, Artificial Sequence
  Chemically synthesized
gccuuuauucuauuaguaguugg

SEQ ID NO: 65509 - RNA, 23 nt, Artificial Sequence
  Chemically synthesized
ugguacagaaaaaaaguuuaguc

SEQ ID NO: 65510 - RNA, 23 nt, Artificial Sequence
  Chemically synthesized
uaacauacauuaaguggcacuaa

SEQ ID NO: 65511 - RNA, 23 nt, Artificial Sequence
  Chemically synthesized
cucucguagccauuucaaaaacc

SEQ ID NO: 65512 - RNA, 23 nt, Artificial Sequence
  Chemically synthesized
ugccuuuauucuauuaguaguug

SEQ ID NO: 65513 - RNA, 23 nt, Artificial Sequence
  Chemically synthesized
guacagaaaaaaaguuuagucag

SEQ ID NO: 65514 - RNA, 23 nt, Artificial Sequence
  Chemically synthesized
uuugccauaucucugccuucuuc

SEQ ID NO: 65515 - RNA, 23 nt, Artificial Sequence
  Chemically synthesized
gguacagaaaaaaaguuuaguca

SEQ ID NO: 65516 - RNA, 23 nt, Artificial Sequence
  Chemically synthesized
uccuguuugccauaucucugccu

SEQ ID NO: 65517 - RNA, 23 nt, Artificial Sequence
  Chemically synthesized
cuguuugccauaucucugccuuc

SEQ ID NO: 65518 - RNA, 23 nt, Artificial Sequence
  Chemically synthesized
uguuugccauaucucugccuucu

SEQ ID NO: 65519 - RNA, 23 nt, Artificial Sequence
  Chemically synthesized
cagggcugucgauggaaaaacac

SEQ ID NO: 65520 - RNA, 23 nt, Artificial Sequence
  Chemically synthesized
uggaaaaacacaucaguauaaca

SEQ ID NO: 65521 - RNA, 23 nt, Artificial Sequence
  Chemically synthesized
uaauugccucaggcgugaaacca

SEQ ID NO: 65522 - RNA, 23 nt, Artificial Sequence
  Chemically synthesized
agaagcaagaaguuaagaaauuc

SEQ ID NO: 65523 - RNA, 23 nt, Artificial Sequence
  Chemically synthesized
ugccauaucucugccuucuucag

SEQ ID NO: 65524 - RNA, 23 nt, Artificial Sequence
  Chemically synthesized
uuucaccggcuccugcuucaucu

SEQ ID NO: 65525 - RNA, 23 nt, Artificial Sequence
  Chemically synthesized
aaccacagaacuguaacucugcc

SEQ ID NO: 65526 - RNA, 23 nt, Artificial Sequence
  Chemically synthesized
caucaccaacaaucaccaguuuc

SEQ ID NO: 65527 - RNA, 23 nt, Artificial Sequence
  Chemically synthesized
uagucagcuggagagaagagaga

SEQ ID NO: 65528 - RNA, 23 nt, Artificial Sequence
  Chemically synthesized
gacuaugagcaagcaugucuuuc

SEQ ID NO: 65529 - RNA, 23 nt, Artificial Sequence
  Chemically synthesized
uaucucugccuucuucagguuuc

SEQ ID NO: 65530 - RNA, 23 nt, Artificial Sequence
  Chemically synthesized
auuaaguggcacuaauuacacag

SEQ ID NO: 65531 - RNA, 23 nt, Artificial Sequence
  Chemically synthesized
uugagcccauuuucaaaaaacug

SEQ ID NO: 65532 - RNA, 23 nt, Artificial Sequence
  Chemically synthesized
uuaaguggcacuaauuacacagu

SEQ ID NO: 65533 - RNA, 23 nt, Artificial Sequence
  Chemically synthesized
aaaccacagaacuguaacucugc

SEQ ID NO: 65534 - RNA, 23 nt, Artificial Sequence
  Chemically synthesized
uuucuuccggauggcagccauug

SEQ ID NO: 65535 - RNA, 23 nt, Artificial Sequence
  Chemically synthesized
uaaguggcacuaauuacacagua

SEQ ID NO: 65536 - RNA, 23 nt, Artificial Sequence
  Chemically synthesized
aaguggcacuaauuacacaguaa

SEQ ID NO: 65537 - RNA, 23 nt, Artificial Sequence
  Chemically synthesized
ugcuugcagcaagguuucacaag

SEQ ID NO: 65538 - RNA, 23 nt, Artificial Sequence
  Chemically synthesized
auaucucugccuucuucagguuu

SEQ ID NO: 65539 - RNA, 23 nt, Artificial Sequence
  Chemically synthesized
aucucugccuucuucagguuuca

SEQ ID NO: 65540 - RNA, 23 nt, Artificial Sequence
  Chemically synthesized
aaagugacaaaacgggaauuuaa

SEQ ID NO: 65541 - RNA, 23 nt, Artificial Sequence
  Chemically synthesized
ugaagacuaugagcaagcauguc

SEQ ID NO: 65542 - RNA, 23 nt, Artificial Sequence
  Chemically synthesized
uucuagaaagaagcaagaaguua

SEQ ID NO: 65543 - RNA, 23 nt, Artificial Sequence
  Chemically synthesized
acuucaaaauuaaccgcauaagg

SEQ ID NO: 65544 - RNA, 23 nt, Artificial Sequence
  Chemically synthesized
caggcuccaucaccaacaaucac

SEQ ID NO: 65545 - RNA, 23 nt, Artificial Sequence
  Chemically synthesized
caucuuuuaucagaaaaagugac

SEQ ID NO: 65546 - RNA, 23 nt, Artificial Sequence
  Chemically synthesized
acugguacagaaaaaaaguuuag

SEQ ID NO: 65547 - RNA, 23 nt, Artificial Sequence
  Chemically synthesized
cauuaaguggcacuaauuacaca

SEQ ID NO: 65548 - RNA, 23 nt, Artificial Sequence
  Chemically synthesized
guccuugcugaagacuaugagca

SEQ ID NO: 65549 - RNA, 23 nt, Artificial Sequence
  Chemically synthesized
uugcugaagacuaugagcaagca

SEQ ID NO: 65550 - RNA, 23 nt, Artificial Sequence
  Chemically synthesized
aagccaacucuaccugcuuucca

SEQ ID NO: 65551 - RNA, 23 nt, Artificial Sequence
  Chemically synthesized
uuuacuuagcccagcuccauggg

SEQ ID NO: 65552 - RNA, 23 nt, Artificial Sequence
  Chemically synthesized
acauuaaguggcacuaauuacac

SEQ ID NO: 65553 - RNA, 23 nt, Artificial Sequence
  Chemically synthesized
caguaacuauaagguaacuaaca

SEQ ID NO: 65554 - RNA, 23 nt, Artificial Sequence
  Chemically synthesized
cugguccuugcugaagacuauga

SEQ ID NO: 65555 - RNA, 23 nt, Artificial Sequence
  Chemically synthesized
ccuugcagcugacagauaauagg

SEQ ID NO: 65556 - RNA, 23 nt, Artificial Sequence
  Chemically synthesized
uuuccacaggcuccaucaccaac

SEQ ID NO: 65557 - RNA, 23 nt, Artificial Sequence
  Chemically synthesized
ucugccacagcugcaugaacuug

SEQ ID NO: 65558 - RNA, 23 nt, Artificial Sequence
  Chemically synthesized
guccacuuuucugggauguuuuc

SEQ ID NO: 65559 - RNA, 23 nt, Artificial Sequence
  Chemically synthesized
aagaccagaccguggacuaacga

SEQ ID NO: 65560 - RNA, 23 nt, Artificial Sequence
  Chemically synthesized
ccuuuauucuauuaguaguugga

SEQ ID NO: 65561 - RNA, 23 nt, Artificial Sequence
  Chemically synthesized
cuuuauucuauuaguaguuggaa

SEQ ID NO: 65562 - RNA, 23 nt, Artificial Sequence
  Chemically synthesized
uuuauucuauuaguaguuggaaa

SEQ ID NO: 65563 - RNA, 23 nt, Artificial Sequence
  Chemically synthesized
uuauucuauuaguaguuggaaaa

SEQ ID NO: 65564 - RNA, 23 nt, Artificial Sequence
  Chemically synthesized
aaauuauagauaaaugaaaaagg

SEQ ID NO: 65565 - RNA, 23 nt, Artificial Sequence
  Chemically synthesized
aauuauagauaaaugaaaaaggc

SEQ ID NO: 65566 - RNA, 23 nt, Artificial Sequence
  Chemically synthesized
ucuuuuuuaaaaaaccaauacac

SEQ ID NO: 65567 - RNA, 23 nt, Artificial Sequence
  Chemically synthesized
cuuuuuuaaaaaaccaauacacu

SEQ ID NO: 65568 - RNA, 23 nt, Artificial Sequence
  Chemically synthesized
uuuuuuaaaaaaccaauacacuu

SEQ ID NO: 65569 - RNA, 23 nt, Artificial Sequence
  Chemically synthesized
uuuuuaaaaaaccaauacacuuu

SEQ ID NO: 65570 - RNA, 23 nt, Artificial Sequence
  Chemically synthesized
uuuuaaaaaaccaauacacuuuc

SEQ ID NO: 65571 - RNA, 23 nt, Artificial Sequence
  Chemically synthesized
auuuaaaaaaugaauuuuccauc

SEQ ID NO: 65572 - RNA, 23 nt, Artificial Sequence
  Chemically synthesized
uuaaaaaaugaauuuuccaucug

SEQ ID NO: 65573 - RNA, 23 nt, Artificial Sequence
  Chemically synthesized
uaaaaaaugaauuuuccaucuga

SEQ ID NO: 65574 - RNA, 23 nt, Artificial Sequence
  Chemically synthesized
uuaguaguuggaaaaauuaacug

SEQ ID NO: 65575 - RNA, 23 nt, Artificial Sequence
  Chemically synthesized
cacaacuaauuucacccaagguu

SEQ ID NO: 65576 - RNA, 23 nt, Artificial Sequence
  Chemically synthesized
ccacaacuaauuucacccaaggu

SEQ ID NO: 65577 - RNA, 23 nt, Artificial Sequence
  Chemically synthesized
accacaacuaauuucacccaagg

SEQ ID NO: 65578 - RNA, 23 nt, Artificial Sequence
  Chemically synthesized
caccacaacuaauuucacccaag

SEQ ID NO: 65579 - RNA, 23 nt, Artificial Sequence
  Chemically synthesized
acaccacaacuaauuucacccaa

SEQ ID NO: 65580 - RNA, 23 nt, Artificial Sequence
  Chemically synthesized
aacaccacaacuaauuucaccca

SEQ ID NO: 65581 - RNA, 23 nt, Artificial Sequence
  Chemically synthesized
acaacuaauuucacccaagguuu

SEQ ID NO: 65582 - RNA, 23 nt, Artificial Sequence
  Chemically synthesized
ccaagguuuuaagcacguucuuu

SEQ ID NO: 65583 - RNA, 23 nt, Artificial Sequence
  Chemically synthesized
cccaagguuuuaagcacguucuu

SEQ ID NO: 65584 - RNA, 23 nt, Artificial Sequence
  Chemically synthesized
acccaagguuuuaagcacguucu

SEQ ID NO: 65585 - RNA, 23 nt, Artificial Sequence
  Chemically synthesized
cacccaagguuuuaagcacguuc

SEQ ID NO: 65586 - RNA, 23 nt, Artificial Sequence
  Chemically synthesized
ucacccaagguuuuaagcacguu

SEQ ID NO: 65587 - RNA, 23 nt, Artificial Sequence
  Chemically synthesized
ccagacuucagaaacaaaucuca

SEQ ID NO: 65588 - RNA, 23 nt, Artificial Sequence
  Chemically synthesized
uccagacuucagaaacaaaucuc

SEQ ID NO: 65589 - RNA, 23 nt, Artificial Sequence
  Chemically synthesized
uuccagacuucagaaacaaaucu

SEQ ID NO: 65590 - RNA, 23 nt, Artificial Sequence
  Chemically synthesized
cuuccagacuucagaaacaaauc

SEQ ID NO: 65591 - RNA, 23 nt, Artificial Sequence
  Chemically synthesized
gcuuccagacuucagaaacaaau

SEQ ID NO: 65592 - RNA, 23 nt, Artificial Sequence
  Chemically synthesized
gcaucucuuucauguucuccuac

SEQ ID NO: 65593 - RNA, 23 nt, Artificial Sequence
  Chemically synthesized
agcaucucuuucauguucuccua

SEQ ID NO: 65594 - RNA, 23 nt, Artificial Sequence
  Chemically synthesized
cagcaucucuuucauguucuccu

SEQ ID NO: 65595 - RNA, 23 nt, Artificial Sequence
  Chemically synthesized
ccagcaucucuuucauguucucc

SEQ ID NO: 65596 - RNA, 23 nt, Artificial Sequence
  Chemically synthesized
gccagcaucucuuucauguucuc

SEQ ID NO: 65597 - RNA, 23 nt, Artificial Sequence
  Chemically synthesized
ggaccacuaugcuguacaucugu

SEQ ID NO: 65598 - RNA, 23 nt, Artificial Sequence
  Chemically synthesized
aggaccacuaugcuguacaucug

SEQ ID NO: 65599 - RNA, 23 nt, Artificial Sequence
  Chemically synthesized
caggaccacuaugcuguacaucu

SEQ ID NO: 65600 - RNA, 23 nt, Artificial Sequence
  Chemically synthesized
ucaggaccacuaugcuguacauc

SEQ ID NO: 65601 - RNA, 23 nt, Artificial Sequence
  Chemically synthesized
cucaggaccacuaugcuguacau

SEQ ID NO: 65602 - RNA, 23 nt, Artificial Sequence
  Chemically synthesized
ccauuuugggacauucuaauccc

SEQ ID NO: 65603 - RNA, 23 nt, Artificial Sequence
  Chemically synthesized
uccauuuugggacauucuaaucc

SEQ ID NO: 65604 - RNA, 23 nt, Artificial Sequence
  Chemically synthesized
cuccauuuugggacauucuaauc

SEQ ID NO: 65605 - RNA, 23 nt, Artificial Sequence
  Chemically synthesized
ucuccauuuugggacauucuaau

SEQ ID NO: 65606 - RNA, 23 nt, Artificial Sequence
  Chemically synthesized
gucuccauuuugggacauucuaa

SEQ ID NO: 65607 - RNA, 23 nt, Artificial Sequence
  Chemically synthesized
gggucaucaaucggaacucaagu

SEQ ID NO: 65608 - RNA, 23 nt, Artificial Sequence
  Chemically synthesized
ggggucaucaaucggaacucaag

SEQ ID NO: 65609 - RNA, 23 nt, Artificial Sequence
  Chemically synthesized
gggggucaucaaucggaacucaa

SEQ ID NO: 65610 - RNA, 23 nt, Artificial Sequence
  Chemically synthesized
agggggucaucaaucggaacuca

SEQ ID NO: 65611 - RNA, 23 nt, Artificial Sequence
  Chemically synthesized
cagggggucaucaaucggaacuc

SEQ ID NO: 65612 - RNA, 23 nt, Artificial Sequence
  Chemically synthesized
gcaucuuagaacccucccuacuc

SEQ ID NO: 65613 - RNA, 23 nt, Artificial Sequence
  Chemically synthesized
ggcaucuuagaacccucccuacu

SEQ ID NO: 65614 - RNA, 23 nt, Artificial Sequence
  Chemically synthesized
uggcaucuuagaacccucccuac

SEQ ID NO: 65615 - RNA, 23 nt, Artificial Sequence
  Chemically synthesized
cuggcaucuuagaacccucccua

SEQ ID NO: 65616 - RNA, 23 nt, Artificial Sequence
  Chemically synthesized
gcuggcaucuuagaacccucccu

SEQ ID NO: 65617 - RNA, 23 nt, Artificial Sequence
  Chemically synthesized
cccuauuauuuucaucaugggcu

SEQ ID NO: 65618 - RNA, 23 nt, Artificial Sequence
  Chemically synthesized
ccccuauuauuuucaucaugggc

SEQ ID NO: 65619 - RNA, 23 nt, Artificial Sequence
  Chemically synthesized
gccccuauuauuuucaucauggg

SEQ ID NO: 65620 - RNA, 23 nt, Artificial Sequence
  Chemically synthesized
agccccuauuauuuucaucaugg

SEQ ID NO: 65621 - RNA, 23 nt, Artificial Sequence
  Chemically synthesized
gagccccuauuauuuucaucaug

SEQ ID NO: 65622 - RNA, 23 nt, Artificial Sequence
  Chemically synthesized
gcagauccgugugguagauggca

SEQ ID NO: 65623 - RNA, 23 nt, Artificial Sequence
  Chemically synthesized
ggcagauccgugugguagauggc

SEQ ID NO: 65624 - RNA, 23 nt, Artificial Sequence
  Chemically synthesized
gggcagauccgugugguagaugg

SEQ ID NO: 65625 - RNA, 23 nt, Artificial Sequence
  Chemically synthesized
cgggcagauccgugugguagaug

SEQ ID NO: 65626 - RNA, 23 nt, Artificial Sequence
  Chemically synthesized
ccgggcagauccgugugguagau

SEQ ID NO: 65627 - RNA, 23 nt, Artificial Sequence
  Chemically synthesized
ugaacaauuugugcggcuacggg

SEQ ID NO: 65628 - RNA, 23 nt, Artificial Sequence
  Chemically synthesized
uugaacaauuugugcggcuacgg

SEQ ID NO: 65629 - RNA, 23 nt, Artificial Sequence
  Chemically synthesized
cuugaacaauuugugcggcuacg

SEQ ID NO: 65630 - RNA, 23 nt, Artificial Sequence
  Chemically synthesized
ccuugaacaauuugugcggcuac

SEQ ID NO: 65631 - RNA, 23 nt, Artificial Sequence
  Chemically synthesized
uccuugaacaauuugugcggcua

SEQ ID NO: 65632 - RNA, 23 nt, Artificial Sequence
  Chemically synthesized
ggucaucaaucggaacucaagug

SEQ ID NO: 65633 - RNA, 23 nt, Artificial Sequence
  Chemically synthesized
uucacccaagguuuuaagcacgu

SEQ ID NO: 65634 - RNA, 23 nt, Artificial Sequence
  Chemically synthesized
caacuaauuucacccaagguuuu

SEQ ID NO: 65635 - RNA, 23 nt, Artificial Sequence
  Chemically synthesized
gcaagccauuuacagaaacccac

SEQ ID NO: 65636 - RNA, 23 nt, Artificial Sequence
  Chemically synthesized
ggcaagccauuuacagaaaccca

SEQ ID NO: 65637 - RNA, 23 nt, Artificial Sequence
  Chemically synthesized
uggcaagccauuuacagaaaccc

SEQ ID NO: 65638 - RNA, 23 nt, Artificial Sequence
  Chemically synthesized
auggcaagccauuuacagaaacc

SEQ ID NO: 65639 - RNA, 23 nt, Artificial Sequence
  Chemically synthesized
cauggcaagccauuuacagaaac

SEQ ID NO: 65640 - RNA, 23 nt, Artificial Sequence
  Chemically synthesized
gcagccagcaucucuuucauguu

SEQ ID NO: 65641 - RNA, 23 nt, Artificial Sequence
  Chemically synthesized
agcagccagcaucucuuucaugu

SEQ ID NO: 65642 - RNA, 23 nt, Artificial Sequence
  Chemically synthesized
cagcagccagcaucucuuucaug

SEQ ID NO: 65643 - RNA, 23 nt, Artificial Sequence
  Chemically synthesized
acagcagccagcaucucuuucau

SEQ ID NO: 65644 - RNA, 23 nt, Artificial Sequence
  Chemically synthesized
cacagcagccagcaucucuuuca

SEQ ID NO: 65645 - RNA, 23 nt, Artificial Sequence
  Chemically synthesized
gcaccgagagaaguuccaacgca

SEQ ID NO: 65646 - RNA, 23 nt, Artificial Sequence
  Chemically synthesized
cgcaccgagagaaguuccaacgc

SEQ ID NO: 65647 - RNA, 23 nt, Artificial Sequence
  Chemically synthesized
gcgcaccgagagaaguuccaacg

SEQ ID NO: 65648 - RNA, 23 nt, Artificial Sequence
  Chemically synthesized
ggcgcaccgagagaaguuccaac

SEQ ID NO: 65649 - RNA, 23 nt, Artificial Sequence
  Chemically synthesized
aggcgcaccgagagaaguuccaa

SEQ ID NO: 65650 - RNA, 23 nt, Artificial Sequence
  Chemically synthesized
gccuuauguuccgcauguacgac

SEQ ID NO: 65651 - RNA, 23 nt, Artificial Sequence
  Chemically synthesized
cgccuuauguuccgcauguacga

SEQ ID NO: 65652 - RNA, 23 nt, Artificial Sequence
  Chemically synthesized
ucgccuuauguuccgcauguacg

SEQ ID NO: 65653 - RNA, 23 nt, Artificial Sequence
  Chemically synthesized
cucgccuuauguuccgcauguac

SEQ ID NO: 65654 - RNA, 23 nt, Artificial Sequence
  Chemically synthesized
ucucgccuuauguuccgcaugua

SEQ ID NO: 65655 - RNA, 23 nt, Artificial Sequence
  Chemically synthesized
ccaaugucuuugucuggcauaaa

SEQ ID NO: 65656 - RNA, 23 nt, Artificial Sequence
  Chemically synthesized
cccaaugucuuugucuggcauaa

SEQ ID NO: 65657 - RNA, 23 nt, Artificial Sequence
  Chemically synthesized
gcccaaugucuuugucuggcaua

SEQ ID NO: 65658 - RNA, 23 nt, Artificial Sequence
  Chemically synthesized
agcccaaugucuuugucuggcau

SEQ ID NO: 65659 - RNA, 23 nt, Artificial Sequence
  Chemically synthesized
cagcccaaugucuuugucuggca

SEQ ID NO: 65660 - RNA, 23 nt, Artificial Sequence
  Chemically synthesized
ccggagcaaugacacuguacugg

SEQ ID NO: 65661 - RNA, 23 nt, Artificial Sequence
  Chemically synthesized
cccggagcaaugacacuguacug

SEQ ID NO: 65662 - RNA, 23 nt, Artificial Sequence
  Chemically synthesized
ucccggagcaaugacacuguacu

SEQ ID NO: 65663 - RNA, 23 nt, Artificial Sequence
  Chemically synthesized
cucccggagcaaugacacuguac

SEQ ID NO: 65664 - RNA, 23 nt, Artificial Sequence
  Chemically synthesized
ucucccggagcaaugacacugua

SEQ ID NO: 65665 - RNA, 23 nt, Artificial Sequence
  Chemically synthesized
gucaucaaucggaacucaagugu

SEQ ID NO: 65666 - RNA, 23 nt, Artificial Sequence
  Chemically synthesized
cgagaccuuagcaacaccaucuc

SEQ ID NO: 65667 - RNA, 23 nt, Artificial Sequence
  Chemically synthesized
ccgagaccuuagcaacaccaucu

SEQ ID NO: 65668 - RNA, 23 nt, Artificial Sequence
  Chemically synthesized
cccgagaccuuagcaacaccauc

SEQ ID NO: 65669 - RNA, 23 nt, Artificial Sequence
  Chemically synthesized
ccccgagaccuuagcaacaccau

SEQ ID NO: 65670 - RNA, 23 nt, Artificial Sequence
  Chemically synthesized
cccccgagaccuuagcaacacca

SEQ ID NO: 65671 - RNA, 23 nt, Artificial Sequence
  Chemically synthesized
cccagucuaacaccacaacuaau

SEQ ID NO: 65672 - RNA, 23 nt, Artificial Sequence
  Chemically synthesized
ccccagucuaacaccacaacuaa

SEQ ID NO: 65673 - RNA, 23 nt, Artificial Sequence
  Chemically synthesized
accccagucuaacaccacaacua

SEQ ID NO: 65674 - RNA, 23 nt, Artificial Sequence
  Chemically synthesized
caccccagucuaacaccacaacu

SEQ ID NO: 65675 - RNA, 23 nt, Artificial Sequence
  Chemically synthesized
gcaccccagucuaacaccacaac

SEQ ID NO: 65676 - RNA, 23 nt, Artificial Sequence
  Chemically synthesized
accauuaugagaacuucuaggcc

SEQ ID NO: 65677 - RNA, 23 nt, Artificial Sequence
  Chemically synthesized
caccauuaugagaacuucuaggc

SEQ ID NO: 65678 - RNA, 23 nt, Artificial Sequence
  Chemically synthesized
ccaccauuaugagaacuucuagg

SEQ ID NO: 65679 - RNA, 23 nt, Artificial Sequence
  Chemically synthesized
cccaccauuaugagaacuucuag

SEQ ID NO: 65680 - RNA, 23 nt, Artificial Sequence
  Chemically synthesized
ucccaccauuaugagaacuucua

SEQ ID NO: 65681 - RNA, 23 nt, Artificial Sequence
  Chemically synthesized
guaccuugauggaccauuuggag

SEQ ID NO: 65682 - RNA, 23 nt, Artificial Sequence
  Chemically synthesized
uguaccuugauggaccauuugga

SEQ ID NO: 65683 - RNA, 23 nt, Artificial Sequence
  Chemically synthesized
cuguaccuugauggaccauuugg

SEQ ID NO: 65684 - RNA, 23 nt, Artificial Sequence
  Chemically synthesized
gcuguaccuugauggaccauuug

SEQ ID NO: 65685 - RNA, 23 nt, Artificial Sequence
  Chemically synthesized
agcuguaccuugauggaccauuu

SEQ ID NO: 65686 - RNA, 23 nt, Artificial Sequence
  Chemically synthesized
cguccucucuugccucuuuccug

SEQ ID NO: 65687 - RNA, 23 nt, Artificial Sequence
  Chemically synthesized
gcguccucucuugccucuuuccu

SEQ ID NO: 65688 - RNA, 23 nt, Artificial Sequence
  Chemically synthesized
agcguccucucuugccucuuucc

SEQ ID NO: 65689 - RNA, 23 nt, Artificial Sequence
  Chemically synthesized
cagcguccucucuugccucuuuc

SEQ ID NO: 65690 - RNA, 23 nt, Artificial Sequence
  Chemically synthesized
ucagcguccucucuugccucuuu

SEQ ID NO: 65691 - RNA, 23 nt, Artificial Sequence
  Chemically synthesized
ccaucguccucacagucuuacac

SEQ ID NO: 65692 - RNA, 23 nt, Artificial Sequence
  Chemically synthesized
gccaucguccucacagucuuaca

SEQ ID NO: 65693 - RNA, 23 nt, Artificial Sequence
  Chemically synthesized
cgccaucguccucacagucuuac

SEQ ID NO: 65694 - RNA, 23 nt, Artificial Sequence
  Chemically synthesized
ccgccaucguccucacagucuua

SEQ ID NO: 65695 - RNA, 23 nt, Artificial Sequence
  Chemically synthesized
accgccaucguccucacagucuu

SEQ ID NO: 65696 - RNA, 23 nt, Artificial Sequence
  Chemically synthesized
ucucuuucauguucuccuacauc

SEQ ID NO: 65697 - RNA, 23 nt, Artificial Sequence
  Chemically synthesized
aucucuuucauguucuccuacau

SEQ ID NO: 65698 - RNA, 23 nt, Artificial Sequence
  Chemically synthesized
caucucuuucauguucuccuaca

SEQ ID NO: 65699 - RNA, 23 nt, Artificial Sequence
  Chemically synthesized
agccagcaucucuuucauguucu

SEQ ID NO: 65700 - RNA, 23 nt, Artificial Sequence
  Chemically synthesized
cagccagcaucucuuucauguuc

SEQ ID NO: 65701 - RNA, 23 nt, Artificial Sequence
  Chemically synthesized
gcaagaagguaacgucauuccag

SEQ ID NO: 65702 - RNA, 23 nt, Artificial Sequence
  Chemically synthesized
ggcaagaagguaacgucauucca

SEQ ID NO: 65703 - RNA, 23 nt, Artificial Sequence
  Chemically synthesized
uggcaagaagguaacgucauucc

SEQ ID NO: 65704 - RNA, 23 nt, Artificial Sequence
  Chemically synthesized
uuggcaagaagguaacgucauuc

SEQ ID NO: 65705 - RNA, 23 nt, Artificial Sequence
  Chemically synthesized
uuuggcaagaagguaacgucauu

SEQ ID NO: 65706 - RNA, 23 nt, Artificial Sequence
  Chemically synthesized
ggaaaagucucgccuuauguucc

SEQ ID NO: 65707 - RNA, 23 nt, Artificial Sequence
  Chemically synthesized
aggaaaagucucgccuuauguuc

SEQ ID NO: 65708 - RNA, 23 nt, Artificial Sequence
  Chemically synthesized
gaggaaaagucucgccuuauguu

SEQ ID NO: 65709 - RNA, 23 nt, Artificial Sequence
  Chemically synthesized
ugaggaaaagucucgccuuaugu

SEQ ID NO: 65710 - RNA, 23 nt, Artificial Sequence
  Chemically synthesized
cugaggaaaagucucgccuuaug

SEQ ID NO: 65711 - RNA, 23 nt, Artificial Sequence
  Chemically synthesized
cccucuguugcuucccuuuggug

SEQ ID NO: 65712 - RNA, 23 nt, Artificial Sequence
  Chemically synthesized
acccucuguugcuucccuuuggu

SEQ ID NO: 65713 - RNA, 23 nt, Artificial Sequence
  Chemically synthesized
gacccucuguugcuucccuuugg

SEQ ID NO: 65714 - RNA, 23 nt, Artificial Sequence
  Chemically synthesized
ggacccucuguugcuucccuuug

SEQ ID NO: 65715 - RNA, 23 nt, Artificial Sequence
  Chemically synthesized
gggacccucuguugcuucccuuu

SEQ ID NO: 65716 - RNA, 23 nt, Artificial Sequence
  Chemically synthesized
cgggacccucuguugcuucccuu

SEQ ID NO: 65717 - RNA, 23 nt, Artificial Sequence
  Chemically synthesized
gcagcccaaugucuuugucuggc

SEQ ID NO: 65718 - RNA, 23 nt, Artificial Sequence
  Chemically synthesized
ugcagcccaaugucuuugucugg

SEQ ID NO: 65719 - RNA, 23 nt, Artificial Sequence
  Chemically synthesized
cugcagcccaaugucuuugucug

SEQ ID NO: 65720 - RNA, 23 nt, Artificial Sequence
  Chemically synthesized
ucugcagcccaaugucuuugucu

SEQ ID NO: 65721 - RNA, 23 nt, Artificial Sequence
  Chemically synthesized
cucugcagcccaaugucuuuguc

SEQ ID NO: 65722 - RNA, 23 nt, Artificial Sequence
  Chemically synthesized
agaaggagauugaagaaauccga

SEQ ID NO: 65723 - RNA, 23 nt, Artificial Sequence
  Chemically synthesized
aagaaggagauugaagaaauccg

SEQ ID NO: 65724 - RNA, 23 nt, Artificial Sequence
  Chemically synthesized
caagaaggagauugaagaaaucc

SEQ ID NO: 65725 - RNA, 23 nt, Artificial Sequence
  Chemically synthesized
ccaagaaggagauugaagaaauc

SEQ ID NO: 65726 - RNA, 23 nt, Artificial Sequence
  Chemically synthesized
uccaagaaggagauugaagaaau

SEQ ID NO: 65727 - RNA, 23 nt, Artificial Sequence
  Chemically synthesized
cucccaccauuaugagaacuucu

SEQ ID NO: 65728 - RNA, 23 nt, Artificial Sequence
  Chemically synthesized
ucucccaccauuaugagaacuuc

SEQ ID NO: 65729 - RNA, 23 nt, Artificial Sequence
  Chemically synthesized
gccaaguguucuguaagaagauc

SEQ ID NO: 65730 - RNA, 23 nt, Artificial Sequence
  Chemically synthesized
ugccaaguguucuguaagaagau

SEQ ID NO: 65731 - RNA, 23 nt, Artificial Sequence
  Chemically synthesized
cugccaaguguucuguaagaaga

SEQ ID NO: 65732 - RNA, 23 nt, Artificial Sequence
  Chemically synthesized
gcugccaaguguucuguaagaag

SEQ ID NO: 65733 - RNA, 23 nt, Artificial Sequence
  Chemically synthesized
agcugccaaguguucuguaagaa

SEQ ID NO: 65734 - RNA, 23 nt, Artificial Sequence
  Chemically synthesized
gcauaaguuugaggugucagugu

SEQ ID NO: 65735 - RNA, 23 nt, Artificial Sequence
  Chemically synthesized
ggcauaaguuugaggugucagug

SEQ ID NO: 65736 - RNA, 23 nt, Artificial Sequence
  Chemically synthesized
uggcauaaguuugaggugucagu

SEQ ID NO: 65737 - RNA, 23 nt, Artificial Sequence
  Chemically synthesized
guggcauaaguuugaggugucag

SEQ ID NO: 65738 - RNA, 23 nt, Artificial Sequence
  Chemically synthesized
aguggcauaaguuugagguguca

SEQ ID NO: 65739 - RNA, 23 nt, Artificial Sequence
  Chemically synthesized
gaguggcauaaguuugagguguc

SEQ ID NO: 65740 - RNA, 23 nt, Artificial Sequence
  Chemically synthesized
ggaguggcauaaguuugaggugu

SEQ ID NO: 65741 - RNA, 23 nt, Artificial Sequence
  Chemically synthesized
aggaguggcauaaguuugaggug

SEQ ID NO: 65742 - RNA, 23 nt, Artificial Sequence
  Chemically synthesized
caggaguggcauaaguuugaggu

SEQ ID NO: 65743 - RNA, 23 nt, Artificial Sequence
  Chemically synthesized
ccaggaguggcauaaguuugagg

SEQ ID NO: 65744 - RNA, 23 nt, Artificial Sequence
  Chemically synthesized
accaggaguggcauaaguuugag

SEQ ID NO: 65745 - RNA, 23 nt, Artificial Sequence
  Chemically synthesized
ggccaucauguaugucuuugccu

SEQ ID NO: 65746 - RNA, 23 nt, Artificial Sequence
  Chemically synthesized
uggccaucauguaugucuuugcc

SEQ ID NO: 65747 - RNA, 23 nt, Artificial Sequence
  Chemically synthesized
cuggccaucauguaugucuuugc

SEQ ID NO: 65748 - RNA, 23 nt, Artificial Sequence
  Chemically synthesized
ccuggccaucauguaugucuuug

SEQ ID NO: 65749 - RNA, 23 nt, Artificial Sequence
  Chemically synthesized
uccuggccaucauguaugucuuu

SEQ ID NO: 65750 - RNA, 23 nt, Artificial Sequence
  Chemically synthesized
agaaguauuacuggugguucuuc

SEQ ID NO: 65751 - RNA, 23 nt, Artificial Sequence
  Chemically synthesized
cagaaguauuacuggugguucuu

SEQ ID NO: 65752 - RNA, 23 nt, Artificial Sequence
  Chemically synthesized
ccagaaguauuacuggugguucu

SEQ ID NO: 65753 - RNA, 23 nt, Artificial Sequence
  Chemically synthesized
cccagaaguauuacuggugguuc

SEQ ID NO: 65754 - RNA, 23 nt, Artificial Sequence
  Chemically synthesized
ccccagaaguauuacuggugguu

SEQ ID NO: 65755 - RNA, 23 nt, Artificial Sequence
  Chemically synthesized
aaaccuuccucaaccgcuacgug

SEQ ID NO: 65756 - RNA, 23 nt, Artificial Sequence
  Chemically synthesized
gaaaccuuccucaaccgcuacgu

SEQ ID NO: 65757 - RNA, 23 nt, Artificial Sequence
  Chemically synthesized
agaaaccuuccucaaccgcuacg

SEQ ID NO: 65758 - RNA, 23 nt, Artificial Sequence
  Chemically synthesized
gagaaaccuuccucaaccgcuac

SEQ ID NO: 65759 - RNA, 23 nt, Artificial Sequence
  Chemically synthesized
cgagaaaccuuccucaaccgcua

SEQ ID NO: 65760 - RNA, 23 nt, Artificial Sequence
  Chemically synthesized
agcgagaggaccauguguugguu

SEQ ID NO: 65761 - RNA, 23 nt, Artificial Sequence
  Chemically synthesized
gagcgagaggaccauguguuggu

SEQ ID NO: 65762 - RNA, 23 nt, Artificial Sequence
  Chemically synthesized
agagcgagaggaccauguguugg

SEQ ID NO: 65763 - RNA, 23 nt, Artificial Sequence
  Chemically synthesized
cagagcgagaggaccauguguug

SEQ ID NO: 65764 - RNA, 23 nt, Artificial Sequence
  Chemically synthesized
gcagagcgagaggaccauguguu

SEQ ID NO: 65765 - RNA, 23 nt, Artificial Sequence
  Chemically synthesized
agguuuuaagcacguucuuucau

SEQ ID NO: 65766 - RNA, 23 nt, Artificial Sequence
  Chemically synthesized
aagguuuuaagcacguucuuuca

SEQ ID NO: 65767 - RNA, 23 nt, Artificial Sequence
  Chemically synthesized
caagguuuuaagcacguucuuuc

SEQ ID NO: 65768 - RNA, 23 nt, Artificial Sequence
  Chemically synthesized
cuaacaccacaacuaauuucacc

SEQ ID NO: 65769 - RNA, 23 nt, Artificial Sequence
  Chemically synthesized
ucuaacaccacaacuaauuucac

SEQ ID NO: 65770 - RNA, 23 nt, Artificial Sequence
  Chemically synthesized
gucuaacaccacaacuaauuuca

SEQ ID NO: 65771 - RNA, 23 nt, Artificial Sequence
  Chemically synthesized
agucuaacaccacaacuaauuuc

SEQ ID NO: 65772 - RNA, 23 nt, Artificial Sequence
  Chemically synthesized
cagucuaacaccacaacuaauuu

SEQ ID NO: 65773 - RNA, 23 nt, Artificial Sequence
  Chemically synthesized
ccagucuaacaccacaacuaauu

SEQ ID NO: 65774 - RNA, 23 nt, Artificial Sequence
  Chemically synthesized
gcaugucuguauguguguugggg

SEQ ID NO: 65775 - RNA, 23 nt, Artificial Sequence
  Chemically synthesized
ugcaugucuguauguguguuggg

SEQ ID NO: 65776 - RNA, 23 nt, Artificial Sequence
  Chemically synthesized
gugcaugucuguauguguguugg

SEQ ID NO: 65777 - RNA, 23 nt, Artificial Sequence
  Chemically synthesized
ugugcaugucuguauguguguug

SEQ ID NO: 65778 - RNA, 23 nt, Artificial Sequence
  Chemically synthesized
gugugcaugucuguauguguguu

SEQ ID NO: 65779 - RNA, 23 nt, Artificial Sequence
  Chemically synthesized
ggacuagagugagaaguagggga

SEQ ID NO: 65780 - RNA, 23 nt, Artificial Sequence
  Chemically synthesized
gggacuagagugagaaguagggg

SEQ ID NO: 65781 - RNA, 23 nt, Artificial Sequence
  Chemically synthesized
agggacuagagugagaaguaggg

SEQ ID NO: 65782 - RNA, 23 nt, Artificial Sequence
  Chemically synthesized
uagggacuagagugagaaguagg

SEQ ID NO: 65783 - RNA, 23 nt, Artificial Sequence
  Chemically synthesized
cuagggacuagagugagaaguag

SEQ ID NO: 65784 - RNA, 23 nt, Artificial Sequence
  Chemically synthesized
ccucuguucuuccuauuucuggc

SEQ ID NO: 65785 - RNA, 23 nt, Artificial Sequence
  Chemically synthesized
accucuguucuuccuauuucugg

SEQ ID NO: 65786 - RNA, 23 nt, Artificial Sequence
  Chemically synthesized
caccucuguucuuccuauuucug

SEQ ID NO: 65787 - RNA, 23 nt, Artificial Sequence
  Chemically synthesized
ucaccucuguucuuccuauuucu

SEQ ID NO: 65788 - RNA, 23 nt, Artificial Sequence
  Chemically synthesized
cucaccucuguucuuccuauuuc

SEQ ID NO: 65789 - RNA, 23 nt, Artificial Sequence
  Chemically synthesized
ggucccagcaaucaucuaugggg

SEQ ID NO: 65790 - RNA, 23 nt, Artificial Sequence
  Chemically synthesized
uggucccagcaaucaucuauggg

SEQ ID NO: 65791 - RNA, 23 nt, Artificial Sequence
  Chemically synthesized
cuggucccagcaaucaucuaugg

SEQ ID NO: 65792 - RNA, 23 nt, Artificial Sequence
  Chemically synthesized
ccuggucccagcaaucaucuaug

SEQ ID NO: 65793 - RNA, 23 nt, Artificial Sequence
  Chemically synthesized
uccuggucccagcaaucaucuau

SEQ ID NO: 65794 - RNA, 23 nt, Artificial Sequence
  Chemically synthesized
guaugucuuugccucccaccacu

SEQ ID NO: 65795 - RNA, 23 nt, Artificial Sequence
  Chemically synthesized
uguaugucuuugccucccaccac

SEQ ID NO: 65796 - RNA, 23 nt, Artificial Sequence
  Chemically synthesized
auguaugucuuugccucccacca

SEQ ID NO: 65797 - RNA, 23 nt, Artificial Sequence
  Chemically synthesized
cauguaugucuuugccucccacc

SEQ ID NO: 65798 - RNA, 23 nt, Artificial Sequence
  Chemically synthesized
ucauguaugucuuugccucccac

SEQ ID NO: 65799 - RNA, 23 nt, Artificial Sequence
  Chemically synthesized
cauuuugggacauucuaaucccu

SEQ ID NO: 65800 - RNA, 23 nt, Artificial Sequence
  Chemically synthesized
gagagaaguuccaacgcagcugu

SEQ ID NO: 65801 - RNA, 23 nt, Artificial Sequence
  Chemically synthesized
cgagagaaguuccaacgcagcug

SEQ ID NO: 65802 - RNA, 23 nt, Artificial Sequence
  Chemically synthesized
ccgagagaaguuccaacgcagcu

SEQ ID NO: 65803 - RNA, 23 nt, Artificial Sequence
  Chemically synthesized
accgagagaaguuccaacgcagc

SEQ ID NO: 65804 - RNA, 23 nt, Artificial Sequence
  Chemically synthesized
caccgagagaaguuccaacgcag

SEQ ID NO: 65805 - RNA, 23 nt, Artificial Sequence
  Chemically synthesized
gcgacauugagacugaguugaca

SEQ ID NO: 65806 - RNA, 23 nt, Artificial Sequence
  Chemically synthesized
agcgacauugagacugaguugac

SEQ ID NO: 65807 - RNA, 23 nt, Artificial Sequence
  Chemically synthesized
cagcgacauugagacugaguuga

SEQ ID NO: 65808 - RNA, 23 nt, Artificial Sequence
  Chemically synthesized
gcagcgacauugagacugaguug

SEQ ID NO: 65809 - RNA, 23 nt, Artificial Sequence
  Chemically synthesized
cgcagcgacauugagacugaguu

SEQ ID NO: 65810 - RNA, 23 nt, Artificial Sequence
  Chemically synthesized
ggauaugaucugucccucuccca

SEQ ID NO: 65811 - RNA, 23 nt, Artificial Sequence
  Chemically synthesized
aggauaugaucugucccucuccc

SEQ ID NO: 65812 - RNA, 23 nt, Artificial Sequence
  Chemically synthesized
caggauaugaucugucccucucc

SEQ ID NO: 65813 - RNA, 23 nt, Artificial Sequence
  Chemically synthesized
ccaggauaugaucugucccucuc

SEQ ID NO: 65814 - RNA, 23 nt, Artificial Sequence
  Chemically synthesized
gccaggauaugaucugucccucu

SEQ ID NO: 65815 - RNA, 23 nt, Artificial Sequence
  Chemically synthesized
ccuucaucgagaucuccaacaac

SEQ ID NO: 65816 - RNA, 23 nt, Artificial Sequence
  Chemically synthesized
uccuucaucgagaucuccaacaa

SEQ ID NO: 65817 - RNA, 23 nt, Artificial Sequence
  Chemically synthesized
auccuucaucgagaucuccaaca

SEQ ID NO: 65818 - RNA, 23 nt, Artificial Sequence
  Chemically synthesized
gauccuucaucgagaucuccaac

SEQ ID NO: 65819 - RNA, 23 nt, Artificial Sequence
  Chemically synthesized
agauccuucaucgagaucuccaa

SEQ ID NO: 65820 - RNA, 23 nt, Artificial Sequence
  Chemically synthesized
agagcaucgugucugagaagcuc

SEQ ID NO: 65821 - RNA, 23 nt, Artificial Sequence
  Chemically synthesized
cagagcaucgugucugagaagcu

SEQ ID NO: 65822 - RNA, 23 nt, Artificial Sequence
  Chemically synthesized
ccagagcaucgugucugagaagc

SEQ ID NO: 65823 - RNA, 23 nt, Artificial Sequence
  Chemically synthesized
gccagagcaucgugucugagaag

SEQ ID NO: 65824 - RNA, 23 nt, Artificial Sequence
  Chemically synthesized
cgccagagcaucgugucugagaa

SEQ ID NO: 65825 - RNA, 23 nt, Artificial Sequence
  Chemically synthesized
caaugucuuugucuggcauaaag

SEQ ID NO: 65826 - RNA, 23 nt, Artificial Sequence
  Chemically synthesized
caucuaugguuccucgcauuccu

SEQ ID NO: 65827 - RNA, 23 nt, Artificial Sequence
  Chemically synthesized
ccaucuaugguuccucgcauucc

SEQ ID NO: 65828 - RNA, 23 nt, Artificial Sequence
  Chemically synthesized
gccaucuaugguuccucgcauuc

SEQ ID NO: 65829 - RNA, 23 nt, Artificial Sequence
  Chemically synthesized
cgccaucuaugguuccucgcauu

SEQ ID NO: 65830 - RNA, 23 nt, Artificial Sequence
  Chemically synthesized
gcgccaucuaugguuccucgcau

SEQ ID NO: 65831 - RNA, 23 nt, Artificial Sequence
  Chemically synthesized
gguuuuaagcacguucuuucauc

SEQ ID NO: 65832 - RNA, 23 nt, Artificial Sequence
  Chemically synthesized
ucuagggacuagagugagaagua

SEQ ID NO: 65833 - RNA, 23 nt, Artificial Sequence
  Chemically synthesized
ccucaccucuguucuuccuauuu

SEQ ID NO: 65834 - RNA, 23 nt, Artificial Sequence
  Chemically synthesized
accucaccucuguucuuccuauu

SEQ ID NO: 65835 - RNA, 23 nt, Artificial Sequence
  Chemically synthesized
ggagucuauucacaggccugcgc

SEQ ID NO: 65836 - RNA, 23 nt, Artificial Sequence
  Chemically synthesized
cggagucuauucacaggccugcg

SEQ ID NO: 65837 - RNA, 23 nt, Artificial Sequence
  Chemically synthesized
ccggagucuauucacaggccugc

SEQ ID NO: 65838 - RNA, 23 nt, Artificial Sequence
  Chemically synthesized
accggagucuauucacaggccug

SEQ ID NO: 65839 - RNA, 23 nt, Artificial Sequence
  Chemically synthesized
aaccggagucuauucacaggccu

SEQ ID NO: 65840 - RNA, 23 nt, Artificial Sequence
  Chemically synthesized
ggcuuugaguacaagucagggca

SEQ ID NO: 65841 - RNA, 23 nt, Artificial Sequence
  Chemically synthesized
gggcuuugaguacaagucagggc

SEQ ID NO: 65842 - RNA, 23 nt, Artificial Sequence
  Chemically synthesized
agggcuuugaguacaagucaggg

SEQ ID NO: 65843 - RNA, 23 nt, Artificial Sequence
  Chemically synthesized
cagggcuuugaguacaagucagg

SEQ ID NO: 65844 - RNA, 23 nt, Artificial Sequence
  Chemically synthesized
ccagggcuuugaguacaagucag

SEQ ID NO: 65845 - RNA, 23 nt, Artificial Sequence
  Chemically synthesized
gccaucauguaugucuuugccuc

SEQ ID NO: 65846 - RNA, 23 nt, Artificial Sequence
  Chemically synthesized
ccuacaucuugcucaccaugugc

SEQ ID NO: 65847 - RNA, 23 nt, Artificial Sequence
  Chemically synthesized
uccuacaucuugcucaccaugug

SEQ ID NO: 65848 - RNA, 23 nt, Artificial Sequence
  Chemically synthesized
cuccuacaucuugcucaccaugu

SEQ ID NO: 65849 - RNA, 23 nt, Artificial Sequence
  Chemically synthesized
ucuccuacaucuugcucaccaug

SEQ ID NO: 65850 - RNA, 23 nt, Artificial Sequence
  Chemically synthesized
uucuccuacaucuugcucaccau

SEQ ID NO: 65851 - RNA, 23 nt, Artificial Sequence
  Chemically synthesized
agacggugcaacaguucaagcgc

SEQ ID NO: 65852 - RNA, 23 nt, Artificial Sequence
  Chemically synthesized
cagacggugcaacaguucaagcg

SEQ ID NO: 65853 - RNA, 23 nt, Artificial Sequence
  Chemically synthesized
ccagacggugcaacaguucaagc

SEQ ID NO: 65854 - RNA, 23 nt, Artificial Sequence
  Chemically synthesized
accagacggugcaacaguucaag

SEQ ID NO: 65855 - RNA, 23 nt, Artificial Sequence
  Chemically synthesized
caccagacggugcaacaguucaa

SEQ ID NO: 65856 - RNA, 23 nt, Artificial Sequence
  Chemically synthesized
acauguuuguggaguccauguuc

SEQ ID NO: 65857 - RNA, 23 nt, Artificial Sequence
  Chemically synthesized
gacauguuuguggaguccauguu

SEQ ID NO: 65858 - RNA, 23 nt, Artificial Sequence
  Chemically synthesized
ggacauguuuguggaguccaugu

SEQ ID NO: 65859 - RNA, 23 nt, Artificial Sequence
  Chemically synthesized
aggacauguuuguggaguccaug

SEQ ID NO: 65860 - RNA, 23 nt, Artificial Sequence
  Chemically synthesized
caggacauguuuguggaguccau

SEQ ID NO: 65861 - RNA, 23 nt, Artificial Sequence
  Chemically synthesized
ggaugagaaauuucaagaggcuc

SEQ ID NO: 65862 - RNA, 23 nt, Artificial Sequence
  Chemically synthesized
cggaugagaaauuucaagaggcu

SEQ ID NO: 65863 - RNA, 23 nt, Artificial Sequence
  Chemically synthesized
ccggaugagaaauuucaagaggc

SEQ ID NO: 65864 - RNA, 23 nt, Artificial Sequence
  Chemically synthesized
uccggaugagaaauuucaagagg

SEQ ID NO: 65865 - RNA, 23 nt, Artificial Sequence
  Chemically synthesized
cuccggaugagaaauuucaagag

SEQ ID NO: 65866 - RNA, 23 nt, Artificial Sequence
  Chemically synthesized
gucuuugucuggcauaaaggaga

SEQ ID NO: 65867 - RNA, 23 nt, Artificial Sequence
  Chemically synthesized
ugucuuugucuggcauaaaggag

SEQ ID NO: 65868 - RNA, 23 nt, Artificial Sequence
  Chemically synthesized
augucuuugucuggcauaaagga

SEQ ID NO: 65869 - RNA, 23 nt, Artificial Sequence
  Chemically synthesized
aaugucuuugucuggcauaaagg

SEQ ID NO: 65870 - RNA, 23 nt, Artificial Sequence
  Chemically synthesized
gcuacugguuugagaacaccagg

SEQ ID NO: 65871 - RNA, 23 nt, Artificial Sequence
  Chemically synthesized
cgcuacugguuugagaacaccag

SEQ ID NO: 65872 - RNA, 23 nt, Artificial Sequence
  Chemically synthesized
ccgcuacugguuugagaacacca

SEQ ID NO: 65873 - RNA, 23 nt, Artificial Sequence
  Chemically synthesized
accgcuacugguuugagaacacc

SEQ ID NO: 65874 - RNA, 23 nt, Artificial Sequence
  Chemically synthesized
gaccgcuacugguuugagaacac

SEQ ID NO: 65875 - RNA, 23 nt, Artificial Sequence
  Chemically synthesized
ggagcaaugacacuguacuggag

SEQ ID NO: 65876 - RNA, 23 nt, Artificial Sequence
  Chemically synthesized
cggagcaaugacacuguacugga

SEQ ID NO: 65877 - RNA, 23 nt, Artificial Sequence
  Chemically synthesized
ccuacaaagugcugaagaugugg

SEQ ID NO: 65878 - RNA, 23 nt, Artificial Sequence
  Chemically synthesized
gccuacaaagugcugaagaugug

SEQ ID NO: 65879 - RNA, 23 nt, Artificial Sequence
  Chemically synthesized
agccuacaaagugcugaagaugu

SEQ ID NO: 65880 - RNA, 23 nt, Artificial Sequence
  Chemically synthesized
aagccuacaaagugcugaagaug

SEQ ID NO: 65881 - RNA, 23 nt, Artificial Sequence
  Chemically synthesized
caagccuacaaagugcugaagau

SEQ ID NO: 65882 - RNA, 23 nt, Artificial Sequence
  Chemically synthesized
aucuaugguuccucgcauuccug

SEQ ID NO: 65883 - RNA, 23 nt, Artificial Sequence
  Chemically synthesized
caccucaccucuguucuuccuau

SEQ ID NO: 65884 - RNA, 23 nt, Artificial Sequence
  Chemically synthesized
ccauuaugagaacuucuaggccc

SEQ ID NO: 65885 - RNA, 23 nt, Artificial Sequence
  Chemically synthesized
caccaggaguggcauaaguuuga

SEQ ID NO: 65886 - RNA, 23 nt, Artificial Sequence
  Chemically synthesized
ccaucauguaugucuuugccucc

SEQ ID NO: 65887 - RNA, 23 nt, Artificial Sequence
  Chemically synthesized
auccuggccaucauguaugucuu

SEQ ID NO: 65888 - RNA, 23 nt, Artificial Sequence
  Chemically synthesized
guccucucuugccucuuuccugg

SEQ ID NO: 65889 - RNA, 23 nt, Artificial Sequence
  Chemically synthesized
acaguucaagcgcuucauugaga

SEQ ID NO: 65890 - RNA, 23 nt, Artificial Sequence
  Chemically synthesized
aacaguucaagcgcuucauugag

SEQ ID NO: 65891 - RNA, 23 nt, Artificial Sequence
  Chemically synthesized
caacaguucaagcgcuucauuga

SEQ ID NO: 65892 - RNA, 23 nt, Artificial Sequence
  Chemically synthesized
gcaacaguucaagcgcuucauug

SEQ ID NO: 65893 - RNA, 23 nt, Artificial Sequence
  Chemically synthesized
ugcaacaguucaagcgcuucauu

SEQ ID NO: 65894 - RNA, 23 nt, Artificial Sequence
  Chemically synthesized
guacgacuuugaugggaauggcc

SEQ ID NO: 65895 - RNA, 23 nt, Artificial Sequence
  Chemically synthesized
uguacgacuuugaugggaauggc

SEQ ID NO: 65896 - RNA, 23 nt, Artificial Sequence
  Chemically synthesized
auguacgacuuugaugggaaugg

SEQ ID NO: 65897 - RNA, 23 nt, Artificial Sequence
  Chemically synthesized
cauguacgacuuugaugggaaug

SEQ ID NO: 65898 - RNA, 23 nt, Artificial Sequence
  Chemically synthesized
gcauguacgacuuugaugggaau

SEQ ID NO: 65899 - RNA, 23 nt, Artificial Sequence
  Chemically synthesized
accuggugcugcuguuuaacuug

SEQ ID NO: 65900 - RNA, 23 nt, Artificial Sequence
  Chemically synthesized
gaccuggugcugcuguuuaacuu

SEQ ID NO: 65901 - RNA, 23 nt, Artificial Sequence
  Chemically synthesized
ugaccuggugcugcuguuuaacu

SEQ ID NO: 65902 - RNA, 23 nt, Artificial Sequence
  Chemically synthesized
augaccuggugcugcuguuuaac

SEQ ID NO: 65903 - RNA, 23 nt, Artificial Sequence
  Chemically synthesized
uaugaccuggugcugcuguuuaa

SEQ ID NO: 65904 - RNA, 23 nt, Artificial Sequence
  Chemically synthesized
ggaagcuuuggaauggcaaggcc

SEQ ID NO: 65905 - RNA, 23 nt, Artificial Sequence
  Chemically synthesized
uggaagcuuuggaauggcaaggc

SEQ ID NO: 65906 - RNA, 23 nt, Artificial Sequence
  Chemically synthesized
auggaagcuuuggaauggcaagg

SEQ ID NO: 65907 - RNA, 23 nt, Artificial Sequence
  Chemically synthesized
cauggaagcuuuggaauggcaag

SEQ ID NO: 65908 - RNA, 23 nt, Artificial Sequence
  Chemically synthesized
gcauggaagcuuuggaauggcaa

SEQ ID NO: 65909 - RNA, 23 nt, Artificial Sequence
  Chemically synthesized
gcuccggaugagaaauuucaaga

SEQ ID NO: 65910 - RNA, 23 nt, Artificial Sequence
  Chemically synthesized
ggcuccggaugagaaauuucaag

SEQ ID NO: 65911 - RNA, 23 nt, Artificial Sequence
  Chemically synthesized
uguuguucgugacuauuuugagg

SEQ ID NO: 65912 - RNA, 23 nt, Artificial Sequence
  Chemically synthesized
cuguuguucgugacuauuuugag

SEQ ID NO: 65913 - RNA, 23 nt, Artificial Sequence
  Chemically synthesized
ucuguuguucgugacuauuuuga

SEQ ID NO: 65914 - RNA, 23 nt, Artificial Sequence
  Chemically synthesized
cucuguuguucgugacuauuuug

SEQ ID NO: 65915 - RNA, 23 nt, Artificial Sequence
  Chemically synthesized
ccucuguuguucgugacuauuuu

SEQ ID NO: 65916 - RNA, 23 nt, Artificial Sequence
  Chemically synthesized
cccucuguuguucgugacuauuu

SEQ ID NO: 65917 - RNA, 23 nt, Artificial Sequence
  Chemically synthesized
ucccucuguuguucgugacuauu

SEQ ID NO: 65918 - RNA, 23 nt, Artificial Sequence
  Chemically synthesized
cucccucuguuguucgugacuau

SEQ ID NO: 65919 - RNA, 23 nt, Artificial Sequence
  Chemically synthesized
gcucccucuguuguucgugacua

SEQ ID NO: 65920 - RNA, 23 nt, Artificial Sequence
  Chemically synthesized
gauugaagaaauccgaaauacca

SEQ ID NO: 65921 - RNA, 23 nt, Artificial Sequence
  Chemically synthesized
agauugaagaaauccgaaauacc

SEQ ID NO: 65922 - RNA, 23 nt, Artificial Sequence
  Chemically synthesized
gagauugaagaaauccgaaauac

SEQ ID NO: 65923 - RNA, 23 nt, Artificial Sequence
  Chemically synthesized
ggagauugaagaaauccgaaaua

SEQ ID NO: 65924 - RNA, 23 nt, Artificial Sequence
  Chemically synthesized
aggagauugaagaaauccgaaau

SEQ ID NO: 65925 - RNA, 23 nt, Artificial Sequence
  Chemically synthesized
gaacaauuugugcggcuacggga

SEQ ID NO: 65926 - RNA, 23 nt, Artificial Sequence
  Chemically synthesized
ggcgucuacaugagaaaugccag

SEQ ID NO: 65927 - RNA, 23 nt, Artificial Sequence
  Chemically synthesized
uggcgucuacaugagaaaugcca

SEQ ID NO: 65928 - RNA, 23 nt, Artificial Sequence
  Chemically synthesized
cuggcgucuacaugagaaaugcc

SEQ ID NO: 65929 - RNA, 23 nt, Artificial Sequence
  Chemically synthesized
ccuggcgucuacaugagaaaugc

SEQ ID NO: 65930 - RNA, 23 nt, Artificial Sequence
  Chemically synthesized
cccuggcgucuacaugagaaaug

SEQ ID NO: 65931 - RNA, 23 nt, Artificial Sequence
  Chemically synthesized
ccccuggcgucuacaugagaaau

SEQ ID NO: 65932 - RNA, 23 nt, Artificial Sequence
  Chemically synthesized
cccccuggcgucuacaugagaaa

SEQ ID NO: 65933 - RNA, 23 nt, Artificial Sequence
  Chemically synthesized
gcccccuggcgucuacaugagaa

SEQ ID NO: 65934 - RNA, 23 nt, Artificial Sequence
  Chemically synthesized
gggucuucuuuggcuaucacgug

SEQ ID NO: 65935 - RNA, 23 nt, Artificial Sequence
  Chemically synthesized
ggggucuucuuuggcuaucacgu

SEQ ID NO: 65936 - RNA, 23 nt, Artificial Sequence
  Chemically synthesized
gggggucuucuuuggcuaucacg

SEQ ID NO: 65937 - RNA, 23 nt, Artificial Sequence
  Chemically synthesized
ugggggucuucuuuggcuaucac

SEQ ID NO: 65938 - RNA, 23 nt, Artificial Sequence
  Chemically synthesized
uugggggucuucuuuggcuauca

SEQ ID NO: 65939 - RNA, 23 nt, Artificial Sequence
  Chemically synthesized
gucucccuuccaaauaaaucacu

SEQ ID NO: 65940 - RNA, 23 nt, Artificial Sequence
  Chemically synthesized
agucucccuuccaaauaaaucac

SEQ ID NO: 65941 - RNA, 23 nt, Artificial Sequence
  Chemically synthesized
uagucucccuuccaaauaaauca

SEQ ID NO: 65942 - RNA, 23 nt, Artificial Sequence
  Chemically synthesized
guagucucccuuccaaauaaauc

SEQ ID NO: 65943 - RNA, 23 nt, Artificial Sequence
  Chemically synthesized
aguagucucccuuccaaauaaau

SEQ ID NO: 65944 - RNA, 23 nt, Artificial Sequence
  Chemically synthesized
accuauguaugcaaugcuccuca

SEQ ID NO: 65945 - RNA, 23 nt, Artificial Sequence
  Chemically synthesized
uaccuauguaugcaaugcuccuc

SEQ ID NO: 65946 - RNA, 23 nt, Artificial Sequence
  Chemically synthesized
auaccuauguaugcaaugcuccu

SEQ ID NO: 65947 - RNA, 23 nt, Artificial Sequence
  Chemically synthesized
aauaccuauguaugcaaugcucc

SEQ ID NO: 65948 - RNA, 23 nt, Artificial Sequence
  Chemically synthesized
caauaccuauguaugcaaugcuc

SEQ ID NO: 65949 - RNA, 23 nt, Artificial Sequence
  Chemically synthesized
ucacuucucccaccauuaugaga

SEQ ID NO: 65950 - RNA, 23 nt, Artificial Sequence
  Chemically synthesized
cucacuucucccaccauuaugag

SEQ ID NO: 65951 - RNA, 23 nt, Artificial Sequence
  Chemically synthesized
acucacuucucccaccauuauga

SEQ ID NO: 65952 - RNA, 23 nt, Artificial Sequence
  Chemically synthesized
gacucacuucucccaccauuaug

SEQ ID NO: 65953 - RNA, 23 nt, Artificial Sequence
  Chemically synthesized
ggacucacuucucccaccauuau

SEQ ID NO: 65954 - RNA, 23 nt, Artificial Sequence
  Chemically synthesized
ggaggugcagcgauuugaugggu

SEQ ID NO: 65955 - RNA, 23 nt, Artificial Sequence
  Chemically synthesized
gggaggugcagcgauuugauggg

SEQ ID NO: 65956 - RNA, 23 nt, Artificial Sequence
  Chemically synthesized
ugggaggugcagcgauuugaugg

SEQ ID NO: 65957 - RNA, 23 nt, Artificial Sequence
  Chemically synthesized
gugggaggugcagcgauuugaug

SEQ ID NO: 65958 - RNA, 23 nt, Artificial Sequence
  Chemically synthesized
cgugggaggugcagcgauuugau

SEQ ID NO: 65959 - RNA, 23 nt, Artificial Sequence
  Chemically synthesized
uguucuguaagaagaucuacuuc

SEQ ID NO: 65960 - RNA, 23 nt, Artificial Sequence
  Chemically synthesized
guguucuguaagaagaucuacuu

SEQ ID NO: 65961 - RNA, 23 nt, Artificial Sequence
  Chemically synthesized
aguguucuguaagaagaucuacu

SEQ ID NO: 65962 - RNA, 23 nt, Artificial Sequence
  Chemically synthesized
aaguguucuguaagaagaucuac

SEQ ID NO: 65963 - RNA, 23 nt, Artificial Sequence
  Chemically synthesized
caaguguucuguaagaagaucua

SEQ ID NO: 65964 - RNA, 23 nt, Artificial Sequence
  Chemically synthesized
gucccagcaaucaucuauggggg

SEQ ID NO: 65965 - RNA, 23 nt, Artificial Sequence
  Chemically synthesized
ccuauuauuuucaucaugggcuu

SEQ ID NO: 65966 - RNA, 23 nt, Artificial Sequence
  Chemically synthesized
ucuuucauguucuccuacaucuu

SEQ ID NO: 65967 - RNA, 23 nt, Artificial Sequence
  Chemically synthesized
cucuuucauguucuccuacaucu

SEQ ID NO: 65968 - RNA, 23 nt, Artificial Sequence
  Chemically synthesized
gugcaacaguucaagcgcuucau

SEQ ID NO: 65969 - RNA, 23 nt, Artificial Sequence
  Chemically synthesized
ggugcaacaguucaagcgcuuca

SEQ ID NO: 65970 - RNA, 23 nt, Artificial Sequence
  Chemically synthesized
uaacgucauuccagcccuugcug

SEQ ID NO: 65971 - RNA, 23 nt, Artificial Sequence
  Chemically synthesized
guaacgucauuccagcccuugcu

SEQ ID NO: 65972 - RNA, 23 nt, Artificial Sequence
  Chemically synthesized
gguaacgucauuccagcccuugc

SEQ ID NO: 65973 - RNA, 23 nt, Artificial Sequence
  Chemically synthesized
agguaacgucauuccagcccuug

SEQ ID NO: 65974 - RNA, 23 nt, Artificial Sequence
  Chemically synthesized
aagguaacgucauuccagcccuu

SEQ ID NO: 65975 - RNA, 23 nt, Artificial Sequence
  Chemically synthesized
uggugcugcuguuuaacuuggag

SEQ ID NO: 65976 - RNA, 23 nt, Artificial Sequence
  Chemically synthesized
cuggugcugcuguuuaacuugga

SEQ ID NO: 65977 - RNA, 23 nt, Artificial Sequence
  Chemically synthesized
ccuggugcugcuguuuaacuugg

SEQ ID NO: 65978 - RNA, 23 nt, Artificial Sequence
  Chemically synthesized
ugagaaauuucaagaggcuccag

SEQ ID NO: 65979 - RNA, 23 nt, Artificial Sequence
  Chemically synthesized
augagaaauuucaagaggcucca

SEQ ID NO: 65980 - RNA, 23 nt, Artificial Sequence
  Chemically synthesized
gaugagaaauuucaagaggcucc

SEQ ID NO: 65981 - RNA, 23 nt, Artificial Sequence
  Chemically synthesized
ccaguagucucccuuccaaauaa

SEQ ID NO: 65982 - RNA, 23 nt, Artificial Sequence
  Chemically synthesized
uccaguagucucccuuccaaaua

SEQ ID NO: 65983 - RNA, 23 nt, Artificial Sequence
  Chemically synthesized
cuccaguagucucccuuccaaau

SEQ ID NO: 65984 - RNA, 23 nt, Artificial Sequence
  Chemically synthesized
gcuccaguagucucccuuccaaa

SEQ ID NO: 65985 - RNA, 23 nt, Artificial Sequence
  Chemically synthesized
ugcuccaguagucucccuuccaa

SEQ ID NO: 65986 - RNA, 23 nt, Artificial Sequence
  Chemically synthesized
caagccauuuacagaaacccacu

SEQ ID NO: 65987 - RNA, 23 nt, Artificial Sequence
  Chemically synthesized
gcuaugcagauggcguguaccag

SEQ ID NO: 65988 - RNA, 23 nt, Artificial Sequence
  Chemically synthesized
agcuaugcagauggcguguacca

SEQ ID NO: 65989 - RNA, 23 nt, Artificial Sequence
  Chemically synthesized
cagcuaugcagauggcguguacc

SEQ ID NO: 65990 - RNA, 23 nt, Artificial Sequence
  Chemically synthesized
ccagcuaugcagauggcguguac

SEQ ID NO: 65991 - RNA, 23 nt, Artificial Sequence
  Chemically synthesized
gccagcuaugcagauggcgugua

SEQ ID NO: 65992 - RNA, 23 nt, Artificial Sequence
  Chemically synthesized
ugcuuccagacuucagaaacaaa

SEQ ID NO: 65993 - RNA, 23 nt, Artificial Sequence
  Chemically synthesized
cugcuuccagacuucagaaacaa

SEQ ID NO: 65994 - RNA, 23 nt, Artificial Sequence
  Chemically synthesized
ccaaguguucuguaagaagaucu

SEQ ID NO: 65995 - RNA, 23 nt, Artificial Sequence
  Chemically synthesized
cagcugccaaguguucuguaaga

SEQ ID NO: 65996 - RNA, 23 nt, Artificial Sequence
  Chemically synthesized
cccagggcuuugaguacaaguca

SEQ ID NO: 65997 - RNA, 23 nt, Artificial Sequence
  Chemically synthesized
uuauuuucaucaugggcuucugc

SEQ ID NO: 65998 - RNA, 23 nt, Artificial Sequence
  Chemically synthesized
auuauuuucaucaugggcuucug

SEQ ID NO: 65999 - RNA, 23 nt, Artificial Sequence
  Chemically synthesized
uauuauuuucaucaugggcuucu

SEQ ID NO: 66000 - RNA, 23 nt, Artificial Sequence
  Chemically synthesized
cuauuauuuucaucaugggcuuc

SEQ ID NO: 66001 - RNA, 23 nt, Artificial Sequence
  Chemically synthesized
aucauguaugucuuugccuccca

SEQ ID NO: 66002 - RNA, 23 nt, Artificial Sequence
  Chemically synthesized
caucauguaugucuuugccuccc

SEQ ID NO: 66003 - RNA, 23 nt, Artificial Sequence
  Chemically synthesized
gaagguaacgucauuccagcccu

SEQ ID NO: 66004 - RNA, 23 nt, Artificial Sequence
  Chemically synthesized
guuuggcaagaagguaacgucau

SEQ ID NO: 66005 - RNA, 23 nt, Artificial Sequence
  Chemically synthesized
cgacuuugaugggaauggccuca

SEQ ID NO: 66006 - RNA, 23 nt, Artificial Sequence
  Chemically synthesized
acgacuuugaugggaauggccuc

SEQ ID NO: 66007 - RNA, 23 nt, Artificial Sequence
  Chemically synthesized
uacgacuuugaugggaauggccu

SEQ ID NO: 66008 - RNA, 23 nt, Artificial Sequence
  Chemically synthesized
ccugaggaaaagucucgccuuau

SEQ ID NO: 66009 - RNA, 23 nt, Artificial Sequence
  Chemically synthesized
uggcugacaaggauggcaauggc

SEQ ID NO: 66010 - RNA, 23 nt, Artificial Sequence
  Chemically synthesized
cuggcugacaaggauggcaaugg

SEQ ID NO: 66011 - RNA, 23 nt, Artificial Sequence
  Chemically synthesized
ucuggcugacaaggauggcaaug

SEQ ID NO: 66012 - RNA, 23 nt, Artificial Sequence
  Chemically synthesized
cucuggcugacaaggauggcaau

SEQ ID NO: 66013 - RNA, 23 nt, Artificial Sequence
  Chemically synthesized
ucucuggcugacaaggauggcaa

SEQ ID NO: 66014 - RNA, 23 nt, Artificial Sequence
  Chemically synthesized
uguuuguggaguccauguucucu

SEQ ID NO: 66015 - RNA, 23 nt, Artificial Sequence
  Chemically synthesized
auguuuguggaguccauguucuc

SEQ ID NO: 66016 - RNA, 23 nt, Artificial Sequence
  Chemically synthesized
cauguuuguggaguccauguucu

SEQ ID NO: 66017 - RNA, 23 nt, Artificial Sequence
  Chemically synthesized
gcuguuuaacuuggaggaagagc

SEQ ID NO: 66018 - RNA, 23 nt, Artificial Sequence
  Chemically synthesized
ugcuguuuaacuuggaggaagag

SEQ ID NO: 66019 - RNA, 23 nt, Artificial Sequence
  Chemically synthesized
cugcuguuuaacuuggaggaaga

SEQ ID NO: 66020 - RNA, 23 nt, Artificial Sequence
  Chemically synthesized
gcugcuguuuaacuuggaggaag

SEQ ID NO: 66021 - RNA, 23 nt, Artificial Sequence
  Chemically synthesized
ugcugcuguuuaacuuggaggaa

SEQ ID NO: 66022 - RNA, 23 nt, Artificial Sequence
  Chemically synthesized
cgugacuauuuugagggcagugg

SEQ ID NO: 66023 - RNA, 23 nt, Artificial Sequence
  Chemically synthesized
ucgugacuauuuugagggcagug

SEQ ID NO: 66024 - RNA, 23 nt, Artificial Sequence
  Chemically synthesized
uucgugacuauuuugagggcagu

SEQ ID NO: 66025 - RNA, 23 nt, Artificial Sequence
  Chemically synthesized
guucgugacuauuuugagggcag

SEQ ID NO: 66026 - RNA, 23 nt, Artificial Sequence
  Chemically synthesized
uguucgugacuauuuugagggca

SEQ ID NO: 66027 - RNA, 23 nt, Artificial Sequence
  Chemically synthesized
gcucugcagcccaaugucuuugu

SEQ ID NO: 66028 - RNA, 23 nt, Artificial Sequence
  Chemically synthesized
cugggccacugaaguuuucccgc

SEQ ID NO: 66029 - RNA, 23 nt, Artificial Sequence
  Chemically synthesized
ccugggccacugaaguuuucccg

SEQ ID NO: 66030 - RNA, 23 nt, Artificial Sequence
  Chemically synthesized
gccugggccacugaaguuuuccc

SEQ ID NO: 66031 - RNA, 23 nt, Artificial Sequence
  Chemically synthesized
ggccugggccacugaaguuuucc

SEQ ID NO: 66032 - RNA, 23 nt, Artificial Sequence
  Chemically synthesized
uggccugggccacugaaguuuuc

SEQ ID NO: 66033 - RNA, 23 nt, Artificial Sequence
  Chemically synthesized
cuggccugggccacugaaguuuu

SEQ ID NO: 66034 - RNA, 23 nt, Artificial Sequence
  Chemically synthesized
ggucuucuuuggcuaucacgugc

SEQ ID NO: 66035 - RNA, 23 nt, Artificial Sequence
  Chemically synthesized
ccauuuacagaaacccacucggc

SEQ ID NO: 66036 - RNA, 23 nt, Artificial Sequence
  Chemically synthesized
gccauuuacagaaacccacucgg

SEQ ID NO: 66037 - RNA, 23 nt, Artificial Sequence
  Chemically synthesized
agccauuuacagaaacccacucg

SEQ ID NO: 66038 - RNA, 23 nt, Artificial Sequence
  Chemically synthesized
aagccauuuacagaaacccacuc

SEQ ID NO: 66039 - RNA, 23 nt, Artificial Sequence
  Chemically synthesized
cggugaguguaaggaugcagugg

SEQ ID NO: 66040 - RNA, 23 nt, Artificial Sequence
  Chemically synthesized
gcggugaguguaaggaugcagug

SEQ ID NO: 66041 - RNA, 23 nt, Artificial Sequence
  Chemically synthesized
ggcggugaguguaaggaugcagu

SEQ ID NO: 66042 - RNA, 23 nt, Artificial Sequence
  Chemically synthesized
gggcggugaguguaaggaugcag

SEQ ID NO: 66043 - RNA, 23 nt, Artificial Sequence
  Chemically synthesized
ggggcggugaguguaaggaugca

SEQ ID NO: 66044 - RNA, 23 nt, Artificial Sequence
  Chemically synthesized
gcugaccugacaaguacuaugug

SEQ ID NO: 66045 - RNA, 23 nt, Artificial Sequence
  Chemically synthesized
agcugaccugacaaguacuaugu

SEQ ID NO: 66046 - RNA, 23 nt, Artificial Sequence
  Chemically synthesized
aagcugaccugacaaguacuaug

SEQ ID NO: 66047 - RNA, 23 nt, Artificial Sequence
  Chemically synthesized
caagcugaccugacaaguacuau

SEQ ID NO: 66048 - RNA, 23 nt, Artificial Sequence
  Chemically synthesized
acaagcugaccugacaaguacua

SEQ ID NO: 66049 - RNA, 23 nt, Artificial Sequence
  Chemically synthesized
cggacucacuucucccaccauua

SEQ ID NO: 66050 - RNA, 23 nt, Artificial Sequence
  Chemically synthesized
ccggacucacuucucccaccauu

SEQ ID NO: 66051 - RNA, 23 nt, Artificial Sequence
  Chemically synthesized
gcgauuugaugggugguacaaca

SEQ ID NO: 66052 - RNA, 23 nt, Artificial Sequence
  Chemically synthesized
agcgauuugaugggugguacaac

SEQ ID NO: 66053 - RNA, 23 nt, Artificial Sequence
  Chemically synthesized
cagcgauuugaugggugguacaa

SEQ ID NO: 66054 - RNA, 23 nt, Artificial Sequence
  Chemically synthesized
gcagcgauuugaugggugguaca

SEQ ID NO: 66055 - RNA, 23 nt, Artificial Sequence
  Chemically synthesized
ugcagcgauuugaugggugguac

SEQ ID NO: 66056 - RNA, 23 nt, Artificial Sequence
  Chemically synthesized
cugcucaucauccaugguagcuu

SEQ ID NO: 66057 - RNA, 23 nt, Artificial Sequence
  Chemically synthesized
ccugcucaucauccaugguagcu

SEQ ID NO: 66058 - RNA, 23 nt, Artificial Sequence
  Chemically synthesized
uccugcucaucauccaugguagc

SEQ ID NO: 66059 - RNA, 23 nt, Artificial Sequence
  Chemically synthesized
guccugcucaucauccaugguag

SEQ ID NO: 66060 - RNA, 23 nt, Artificial Sequence
  Chemically synthesized
uguccugcucaucauccauggua

SEQ ID NO: 66061 - RNA, 23 nt, Artificial Sequence
  Chemically synthesized
accucuacauccugcucuauguc

SEQ ID NO: 66062 - RNA, 23 nt, Artificial Sequence
  Chemically synthesized
caccucuacauccugcucuaugu

SEQ ID NO: 66063 - RNA, 23 nt, Artificial Sequence
  Chemically synthesized
ccaccucuacauccugcucuaug

SEQ ID NO: 66064 - RNA, 23 nt, Artificial Sequence
  Chemically synthesized
accaccucuacauccugcucuau

SEQ ID NO: 66065 - RNA, 23 nt, Artificial Sequence
  Chemically synthesized
caccaccucuacauccugcucua

SEQ ID NO: 66066 - RNA, 23 nt, Artificial Sequence
  Chemically synthesized
guucuccuacaucuugcucacca

SEQ ID NO: 66067 - RNA, 23 nt, Artificial Sequence
  Chemically synthesized
ucaagcgcuucauugagaacuac

SEQ ID NO: 66068 - RNA, 23 nt, Artificial Sequence
  Chemically synthesized
uucaagcgcuucauugagaacua

SEQ ID NO: 66069 - RNA, 23 nt, Artificial Sequence
  Chemically synthesized
guucaagcgcuucauugagaacu

SEQ ID NO: 66070 - RNA, 23 nt, Artificial Sequence
  Chemically synthesized
aguucaagcgcuucauugagaac

SEQ ID NO: 66071 - RNA, 23 nt, Artificial Sequence
  Chemically synthesized
caguucaagcgcuucauugagaa

SEQ ID NO: 66072 - RNA, 23 nt, Artificial Sequence
  Chemically synthesized
cggugcaacaguucaagcgcuuc

SEQ ID NO: 66073 - RNA, 23 nt, Artificial Sequence
  Chemically synthesized
cgacauugagacugaguugacac

SEQ ID NO: 66074 - RNA, 23 nt, Artificial Sequence
  Chemically synthesized
ugacaugggaagauuuucacuuc

SEQ ID NO: 66075 - RNA, 23 nt, Artificial Sequence
  Chemically synthesized
cugacaugggaagauuuucacuu

SEQ ID NO: 66076 - RNA, 23 nt, Artificial Sequence
  Chemically synthesized
acugacaugggaagauuuucacu

SEQ ID NO: 66077 - RNA, 23 nt, Artificial Sequence
  Chemically synthesized
aacugacaugggaagauuuucac

SEQ ID NO: 66078 - RNA, 23 nt, Artificial Sequence
  Chemically synthesized
gaacugacaugggaagauuuuca

SEQ ID NO: 66079 - RNA, 23 nt, Artificial Sequence
  Chemically synthesized
ucauuuccaaggaugaguucauc

SEQ ID NO: 66080 - RNA, 23 nt, Artificial Sequence
  Chemically synthesized
cucauuuccaaggaugaguucau

SEQ ID NO: 66081 - RNA, 23 nt, Artificial Sequence
  Chemically synthesized
ccucauuuccaaggaugaguuca

SEQ ID NO: 66082 - RNA, 23 nt, Artificial Sequence
  Chemically synthesized
gccucauuuccaaggaugaguuc

SEQ ID NO: 66083 - RNA, 23 nt, Artificial Sequence
  Chemically synthesized
ggccucauuuccaaggaugaguu

SEQ ID NO: 66084 - RNA, 23 nt, Artificial Sequence
  Chemically synthesized
guggucuucaugaaaggcucucc

SEQ ID NO: 66085 - RNA, 23 nt, Artificial Sequence
  Chemically synthesized
gguggucuucaugaaaggcucuc

SEQ ID NO: 66086 - RNA, 23 nt, Artificial Sequence
  Chemically synthesized
ugguggucuucaugaaaggcucu

SEQ ID NO: 66087 - RNA, 23 nt, Artificial Sequence
  Chemically synthesized
cugguggucuucaugaaaggcuc

SEQ ID NO: 66088 - RNA, 23 nt, Artificial Sequence
  Chemically synthesized
ccugguggucuucaugaaaggcu

SEQ ID NO: 66089 - RNA, 23 nt, Artificial Sequence
  Chemically synthesized
uccugguggucuucaugaaaggc

SEQ ID NO: 66090 - RNA, 23 nt, Artificial Sequence
  Chemically synthesized
auccugguggucuucaugaaagg

SEQ ID NO: 66091 - RNA, 23 nt, Artificial Sequence
  Chemically synthesized
cauccugguggucuucaugaaag

SEQ ID NO: 66092 - RNA, 23 nt, Artificial Sequence
  Chemically synthesized
cuguuuaacuuggaggaagagcg

SEQ ID NO: 66093 - RNA, 23 nt, Artificial Sequence
  Chemically synthesized
ggcauggaagcuuuggaauggca

SEQ ID NO: 66094 - RNA, 23 nt, Artificial Sequence
  Chemically synthesized
ugacuauuuugagggcaguggau

SEQ ID NO: 66095 - RNA, 23 nt, Artificial Sequence
  Chemically synthesized
gugacuauuuugagggcagugga

SEQ ID NO: 66096 - RNA, 23 nt, Artificial Sequence
  Chemically synthesized
gguugaagaugugcgggauuucu

SEQ ID NO: 66097 - RNA, 23 nt, Artificial Sequence
  Chemically synthesized
ugguugaagaugugcgggauuuc

SEQ ID NO: 66098 - RNA, 23 nt, Artificial Sequence
  Chemically synthesized
uugguugaagaugugcgggauuu

SEQ ID NO: 66099 - RNA, 23 nt, Artificial Sequence
  Chemically synthesized
guugguugaagaugugcgggauu

SEQ ID NO: 66100 - RNA, 23 nt, Artificial Sequence
  Chemically synthesized
uguugguugaagaugugcgggau

SEQ ID NO: 66101 - RNA, 23 nt, Artificial Sequence
  Chemically synthesized
ucgccaccuaccagaacaucgcu

SEQ ID NO: 66102 - RNA, 23 nt, Artificial Sequence
  Chemically synthesized
aucgccaccuaccagaacaucgc

SEQ ID NO: 66103 - RNA, 23 nt, Artificial Sequence
  Chemically synthesized
caucgccaccuaccagaacaucg

SEQ ID NO: 66104 - RNA, 23 nt, Artificial Sequence
  Chemically synthesized
ucaucgccaccuaccagaacauc

SEQ ID NO: 66105 - RNA, 23 nt, Artificial Sequence
  Chemically synthesized
gucaucgccaccuaccagaacau

SEQ ID NO: 66106 - RNA, 23 nt, Artificial Sequence
  Chemically synthesized
ugagaaaccgcacaguguugggg

SEQ ID NO: 66107 - RNA, 23 nt, Artificial Sequence
  Chemically synthesized
cugagaaaccgcacaguguuggg

SEQ ID NO: 66108 - RNA, 23 nt, Artificial Sequence
  Chemically synthesized
ccugagaaaccgcacaguguugg

SEQ ID NO: 66109 - RNA, 23 nt, Artificial Sequence
  Chemically synthesized
cccugagaaaccgcacaguguug

SEQ ID NO: 66110 - RNA, 23 nt, Artificial Sequence
  Chemically synthesized
ucccugagaaaccgcacaguguu

SEQ ID NO: 66111 - RNA, 23 nt, Artificial Sequence
  Chemically synthesized
ucccauaccuccuccucuucugg

SEQ ID NO: 66112 - RNA, 23 nt, Artificial Sequence
  Chemically synthesized
cucccauaccuccuccucuucug

SEQ ID NO: 66113 - RNA, 23 nt, Artificial Sequence
  Chemically synthesized
acucccauaccuccuccucuucu

SEQ ID NO: 66114 - RNA, 23 nt, Artificial Sequence
  Chemically synthesized
uacucccauaccuccuccucuuc

SEQ ID NO: 66115 - RNA, 23 nt, Artificial Sequence
  Chemically synthesized
cuacucccauaccuccuccucuu

SEQ ID NO: 66116 - RNA, 23 nt, Artificial Sequence
  Chemically synthesized
ugugugcaugucuguaugugugu

SEQ ID NO: 66117 - RNA, 23 nt, Artificial Sequence
  Chemically synthesized
gugugugcaugucuguaugugug

SEQ ID NO: 66118 - RNA, 23 nt, Artificial Sequence
  Chemically synthesized
agguggccauagucagucaccau

SEQ ID NO: 66119 - RNA, 23 nt, Artificial Sequence
  Chemically synthesized
cagguggccauagucagucacca

SEQ ID NO: 66120 - RNA, 23 nt, Artificial Sequence
  Chemically synthesized
ccagguggccauagucagucacc

SEQ ID NO: 66121 - RNA, 23 nt, Artificial Sequence
  Chemically synthesized
uccagguggccauagucagucac

SEQ ID NO: 66122 - RNA, 23 nt, Artificial Sequence
  Chemically synthesized
uuccagguggccauagucaguca

SEQ ID NO: 66123 - RNA, 23 nt, Artificial Sequence
  Chemically synthesized
accggacucacuucucccaccau

SEQ ID NO: 66124 - RNA, 23 nt, Artificial Sequence
  Chemically synthesized
cgauuugaugggugguacaacaa

SEQ ID NO: 66125 - RNA, 23 nt, Artificial Sequence
  Chemically synthesized
gugcagcgauuugauggguggua

SEQ ID NO: 66126 - RNA, 23 nt, Artificial Sequence
  Chemically synthesized
gaaccggagucuauucacaggcc

SEQ ID NO: 66127 - RNA, 23 nt, Artificial Sequence
  Chemically synthesized
ugaaccggagucuauucacaggc

SEQ ID NO: 66128 - RNA, 23 nt, Artificial Sequence
  Chemically synthesized
cugaaccggagucuauucacagg

SEQ ID NO: 66129 - RNA, 23 nt, Artificial Sequence
  Chemically synthesized
ucugaaccggagucuauucacag

SEQ ID NO: 66130 - RNA, 23 nt, Artificial Sequence
  Chemically synthesized
uucugaaccggagucuauucaca

SEQ ID NO: 66131 - RNA, 23 nt, Artificial Sequence
  Chemically synthesized
ccucaggaccacuaugcuguaca

SEQ ID NO: 66132 - RNA, 23 nt, Artificial Sequence
  Chemically synthesized
accucaggaccacuaugcuguac

SEQ ID NO: 66133 - RNA, 23 nt, Artificial Sequence
  Chemically synthesized
agcauggacacuucugguugggg

SEQ ID NO: 66134 - RNA, 23 nt, Artificial Sequence
  Chemically synthesized
uagcauggacacuucugguuggg

SEQ ID NO: 66135 - RNA, 23 nt, Artificial Sequence
  Chemically synthesized
cuagcauggacacuucugguugg

SEQ ID NO: 66136 - RNA, 23 nt, Artificial Sequence
  Chemically synthesized
ucuagcauggacacuucugguug

SEQ ID NO: 66137 - RNA, 23 nt, Artificial Sequence
  Chemically synthesized
cucuagcauggacacuucugguu

SEQ ID NO: 66138 - RNA, 23 nt, Artificial Sequence
  Chemically synthesized
ucaucauccaugguagcuuugcc

SEQ ID NO: 66139 - RNA, 23 nt, Artificial Sequence
  Chemically synthesized
cucaucauccaugguagcuuugc

SEQ ID NO: 66140 - RNA, 23 nt, Artificial Sequence
  Chemically synthesized
gcucaucauccaugguagcuuug

SEQ ID NO: 66141 - RNA, 23 nt, Artificial Sequence
  Chemically synthesized
ugcucaucauccaugguagcuuu

SEQ ID NO: 66142 - RNA, 23 nt, Artificial Sequence
  Chemically synthesized
cguccucacagucuuacacagug

SEQ ID NO: 66143 - RNA, 23 nt, Artificial Sequence
  Chemically synthesized
ucguccucacagucuuacacagu

SEQ ID NO: 66144 - RNA, 23 nt, Artificial Sequence
  Chemically synthesized
aucguccucacagucuuacacag

SEQ ID NO: 66145 - RNA, 23 nt, Artificial Sequence
  Chemically synthesized
caucguccucacagucuuacaca

SEQ ID NO: 66146 - RNA, 23 nt, Artificial Sequence
  Chemically synthesized
caagaagguaacgucauuccagc

SEQ ID NO: 66147 - RNA, 23 nt, Artificial Sequence
  Chemically synthesized
caugggaagauuuucacuucaug

SEQ ID NO: 66148 - RNA, 23 nt, Artificial Sequence
  Chemically synthesized
acaugggaagauuuucacuucau

SEQ ID NO: 66149 - RNA, 23 nt, Artificial Sequence
  Chemically synthesized
gacaugggaagauuuucacuuca

SEQ ID NO: 66150 - RNA, 23 nt, Artificial Sequence
  Chemically synthesized
cgcauguacgacuuugaugggaa

SEQ ID NO: 66151 - RNA, 23 nt, Artificial Sequence
  Chemically synthesized
ccgcauguacgacuuugauggga

SEQ ID NO: 66152 - RNA, 23 nt, Artificial Sequence
  Chemically synthesized
uccgcauguacgacuuugauggg

SEQ ID NO: 66153 - RNA, 23 nt, Artificial Sequence
  Chemically synthesized
uuccgcauguacgacuuugaugg

SEQ ID NO: 66154 - RNA, 23 nt, Artificial Sequence
  Chemically synthesized
guuccgcauguacgacuuugaug

SEQ ID NO: 66155 - RNA, 23 nt, Artificial Sequence
  Chemically synthesized
uggucuucaugaaaggcucuccu

SEQ ID NO: 66156 - RNA, 23 nt, Artificial Sequence
  Chemically synthesized
uguucucucuggcugacaaggau

SEQ ID NO: 66157 - RNA, 23 nt, Artificial Sequence
  Chemically synthesized
auguucucucuggcugacaagga

SEQ ID NO: 66158 - RNA, 23 nt, Artificial Sequence
  Chemically synthesized
cauguucucucuggcugacaagg

SEQ ID NO: 66159 - RNA, 23 nt, Artificial Sequence
  Chemically synthesized
ccauguucucucuggcugacaag

SEQ ID NO: 66160 - RNA, 23 nt, Artificial Sequence
  Chemically synthesized
uccauguucucucuggcugacaa

SEQ ID NO: 66161 - RNA, 23 nt, Artificial Sequence
  Chemically synthesized
ccaggacauguuuguggagucca

SEQ ID NO: 66162 - RNA, 23 nt, Artificial Sequence
  Chemically synthesized
cccaggacauguuuguggagucc

SEQ ID NO: 66163 - RNA, 23 nt, Artificial Sequence
  Chemically synthesized
ccccaggacauguuuguggaguc

SEQ ID NO: 66164 - RNA, 23 nt, Artificial Sequence
  Chemically synthesized
gccccaggacauguuuguggagu

SEQ ID NO: 66165 - RNA, 23 nt, Artificial Sequence
  Chemically synthesized
agccccaggacauguuuguggag

SEQ ID NO: 66166 - RNA, 23 nt, Artificial Sequence
  Chemically synthesized
aggcgcugguggaaaaucuccgg

SEQ ID NO: 66167 - RNA, 23 nt, Artificial Sequence
  Chemically synthesized
caggcgcugguggaaaaucuccg

SEQ ID NO: 66168 - RNA, 23 nt, Artificial Sequence
  Chemically synthesized
gcaggcgcugguggaaaaucucc

SEQ ID NO: 66169 - RNA, 23 nt, Artificial Sequence
  Chemically synthesized
ggcaggcgcugguggaaaaucuc

SEQ ID NO: 66170 - RNA, 23 nt, Artificial Sequence
  Chemically synthesized
cggcaggcgcugguggaaaaucu

SEQ ID NO: 66171 - RNA, 23 nt, Artificial Sequence
  Chemically synthesized
gugcugcuguuuaacuuggagga

SEQ ID NO: 66172 - RNA, 23 nt, Artificial Sequence
  Chemically synthesized
ggugcugcuguuuaacuuggagg

SEQ ID NO: 66173 - RNA, 23 nt, Artificial Sequence
  Chemically synthesized
guaugaccuggugcugcuguuua

SEQ ID NO: 66174 - RNA, 23 nt, Artificial Sequence
  Chemically synthesized
acuucguccuguccagcaaccgu

SEQ ID NO: 66175 - RNA, 23 nt, Artificial Sequence
  Chemically synthesized
aacuucguccuguccagcaaccg

SEQ ID NO: 66176 - RNA, 23 nt, Artificial Sequence
  Chemically synthesized
caacuucguccuguccagcaacc

SEQ ID NO: 66177 - RNA, 23 nt, Artificial Sequence
  Chemically synthesized
ucaacuucguccuguccagcaac

SEQ ID NO: 66178 - RNA, 23 nt, Artificial Sequence
  Chemically synthesized
gucaacuucguccuguccagcaa

SEQ ID NO: 66179 - RNA, 23 nt, Artificial Sequence
  Chemically synthesized
cggcuccggaugagaaauuucaa

SEQ ID NO: 66180 - RNA, 23 nt, Artificial Sequence
  Chemically synthesized
ugcucccucuguuguucgugacu

SEQ ID NO: 66181 - RNA, 23 nt, Artificial Sequence
  Chemically synthesized
gaccucuguucagcaccaucguc

SEQ ID NO: 66182 - RNA, 23 nt, Artificial Sequence
  Chemically synthesized
ggaccucuguucagcaccaucgu

SEQ ID NO: 66183 - RNA, 23 nt, Artificial Sequence
  Chemically synthesized
uggaccucuguucagcaccaucg

SEQ ID NO: 66184 - RNA, 23 nt, Artificial Sequence
  Chemically synthesized
cuggaccucuguucagcaccauc

SEQ ID NO: 66185 - RNA, 23 nt, Artificial Sequence
  Chemically synthesized
ccuggaccucuguucagcaccau

SEQ ID NO: 66186 - RNA, 23 nt, Artificial Sequence
  Chemically synthesized
gcaaugacacuguacuggaggcc

SEQ ID NO: 66187 - RNA, 23 nt, Artificial Sequence
  Chemically synthesized
agcaaugacacuguacuggaggc

SEQ ID NO: 66188 - RNA, 23 nt, Artificial Sequence
  Chemically synthesized
gagcaaugacacuguacuggagg

SEQ ID NO: 66189 - RNA, 23 nt, Artificial Sequence
  Chemically synthesized
acaaagugcugaagauguggaug

SEQ ID NO: 66190 - RNA, 23 nt, Artificial Sequence
  Chemically synthesized
uacaaagugcugaagauguggau

SEQ ID NO: 66191 - RNA, 23 nt, Artificial Sequence
  Chemically synthesized
cuacaaagugcugaagaugugga

SEQ ID NO: 66192 - RNA, 23 nt, Artificial Sequence
  Chemically synthesized
guguaaggaugcagugggagcau

SEQ ID NO: 66193 - RNA, 23 nt, Artificial Sequence
  Chemically synthesized
aguguaaggaugcagugggagca

SEQ ID NO: 66194 - RNA, 23 nt, Artificial Sequence
  Chemically synthesized
gaguguaaggaugcagugggagc

SEQ ID NO: 66195 - RNA, 23 nt, Artificial Sequence
  Chemically synthesized
ugaguguaaggaugcagugggag

SEQ ID NO: 66196 - RNA, 23 nt, Artificial Sequence
  Chemically synthesized
gugaguguaaggaugcaguggga

SEQ ID NO: 66197 - RNA, 23 nt, Artificial Sequence
  Chemically synthesized
cuaugugugugcaugucuguaug

SEQ ID NO: 66198 - RNA, 23 nt, Artificial Sequence
  Chemically synthesized
acuaugugugugcaugucuguau

SEQ ID NO: 66199 - RNA, 23 nt, Artificial Sequence
  Chemically synthesized
guacuaugugugugcaugucugu

SEQ ID NO: 66200 - RNA, 23 nt, Artificial Sequence
  Chemically synthesized
aguacuaugugugugcaugucug

SEQ ID NO: 66201 - RNA, 23 nt, Artificial Sequence
  Chemically synthesized
caaguacuaugugugugcauguc

SEQ ID NO: 66202 - RNA, 23 nt, Artificial Sequence
  Chemically synthesized
acaaguacuaugugugugcaugu

SEQ ID NO: 66203 - RNA, 23 nt, Artificial Sequence
  Chemically synthesized
gacaaguacuaugugugugcaug

SEQ ID NO: 66204 - RNA, 23 nt, Artificial Sequence
  Chemically synthesized
ugacaaguacuaugugugugcau

SEQ ID NO: 66205 - RNA, 23 nt, Artificial Sequence
  Chemically synthesized
cugacaaguacuaugugugugca

SEQ ID NO: 66206 - RNA, 23 nt, Artificial Sequence
  Chemically synthesized
ccugacaaguacuaugugugugc

SEQ ID NO: 66207 - RNA, 23 nt, Artificial Sequence
  Chemically synthesized
accugacaaguacuaugugugug

SEQ ID NO: 66208 - RNA, 23 nt, Artificial Sequence
  Chemically synthesized
gaccugacaaguacuaugugugu

SEQ ID NO: 66209 - RNA, 23 nt, Artificial Sequence
  Chemically synthesized
ugaccugacaaguacuaugugug

SEQ ID NO: 66210 - RNA, 23 nt, Artificial Sequence
  Chemically synthesized
cugaccugacaaguacuaugugu

SEQ ID NO: 66211 - RNA, 23 nt, Artificial Sequence
  Chemically synthesized
acaccucaccucuguucuuccua

SEQ ID NO: 66212 - RNA, 23 nt, Artificial Sequence
  Chemically synthesized
cacaccucaccucuguucuuccu

SEQ ID NO: 66213 - RNA, 23 nt, Artificial Sequence
  Chemically synthesized
ccacaccucaccucuguucuucc

SEQ ID NO: 66214 - RNA, 23 nt, Artificial Sequence
  Chemically synthesized
cccacaccucaccucuguucuuc

SEQ ID NO: 66215 - RNA, 23 nt, Artificial Sequence
  Chemically synthesized
gcccacaccucaccucuguucuu

SEQ ID NO: 66216 - RNA, 23 nt, Artificial Sequence
  Chemically synthesized
ccaguugagcagagguuugagcc

SEQ ID NO: 66217 - RNA, 23 nt, Artificial Sequence
  Chemically synthesized
cccaguugagcagagguuugagc

SEQ ID NO: 66218 - RNA, 23 nt, Artificial Sequence
  Chemically synthesized
gcccaguugagcagagguuugag

SEQ ID NO: 66219 - RNA, 23 nt, Artificial Sequence
  Chemically synthesized
ugcccaguugagcagagguuuga

SEQ ID NO: 66220 - RNA, 23 nt, Artificial Sequence
  Chemically synthesized
cugcccaguugagcagagguuug

SEQ ID NO: 66221 - RNA, 23 nt, Artificial Sequence
  Chemically synthesized
ccuucuucaacucccugcaggag

SEQ ID NO: 66222 - RNA, 23 nt, Artificial Sequence
  Chemically synthesized
cccuucuucaacucccugcagga

SEQ ID NO: 66223 - RNA, 23 nt, Artificial Sequence
  Chemically synthesized
gcccuucuucaacucccugcagg

SEQ ID NO: 66224 - RNA, 23 nt, Artificial Sequence
  Chemically synthesized
agcccuucuucaacucccugcag

SEQ ID NO: 66225 - RNA, 23 nt, Artificial Sequence
  Chemically synthesized
gagcccuucuucaacucccugca

SEQ ID NO: 66226 - RNA, 23 nt, Artificial Sequence
  Chemically synthesized
acaucuacaucacccagcuggcu

SEQ ID NO: 66227 - RNA, 23 nt, Artificial Sequence
  Chemically synthesized
cacaucuacaucacccagcuggc

SEQ ID NO: 66228 - RNA, 23 nt, Artificial Sequence
  Chemically synthesized
gcacaucuacaucacccagcugg

SEQ ID NO: 66229 - RNA, 23 nt, Artificial Sequence
  Chemically synthesized
ugcacaucuacaucacccagcug

SEQ ID NO: 66230 - RNA, 23 nt, Artificial Sequence
  Chemically synthesized
gugcacaucuacaucacccagcu

SEQ ID NO: 66231 - RNA, 23 nt, Artificial Sequence
  Chemically synthesized
ugaggugucaguguuagugggag

SEQ ID NO: 66232 - RNA, 23 nt, Artificial Sequence
  Chemically synthesized
uugaggugucaguguuaguggga

SEQ ID NO: 66233 - RNA, 23 nt, Artificial Sequence
  Chemically synthesized
uuugaggugucaguguuaguggg

SEQ ID NO: 66234 - RNA, 23 nt, Artificial Sequence
  Chemically synthesized
guuugaggugucaguguuagugg

SEQ ID NO: 66235 - RNA, 23 nt, Artificial Sequence
  Chemically synthesized
aguuugaggugucaguguuagug

SEQ ID NO: 66236 - RNA, 23 nt, Artificial Sequence
  Chemically synthesized
gaguacaagucagggcagugggu

SEQ ID NO: 66237 - RNA, 23 nt, Artificial Sequence
  Chemically synthesized
ugaguacaagucagggcaguggg

SEQ ID NO: 66238 - RNA, 23 nt, Artificial Sequence
  Chemically synthesized
uugaguacaagucagggcagugg

SEQ ID NO: 66239 - RNA, 23 nt, Artificial Sequence
  Chemically synthesized
uuugaguacaagucagggcagug

SEQ ID NO: 66240 - RNA, 23 nt, Artificial Sequence
  Chemically synthesized
cuuugaguacaagucagggcagu

SEQ ID NO: 66241 - RNA, 23 nt, Artificial Sequence
  Chemically synthesized
gauccuggccaucauguaugucu

SEQ ID NO: 66242 - RNA, 23 nt, Artificial Sequence
  Chemically synthesized
ggccucuuccaugaugauggguc

SEQ ID NO: 66243 - RNA, 23 nt, Artificial Sequence
  Chemically synthesized
uggccucuuccaugaugaugggu

SEQ ID NO: 66244 - RNA, 23 nt, Artificial Sequence
  Chemically synthesized
cuggccucuuccaugaugauggg

SEQ ID NO: 66245 - RNA, 23 nt, Artificial Sequence
  Chemically synthesized
ccuggccucuuccaugaugaugg

SEQ ID NO: 66246 - RNA, 23 nt, Artificial Sequence
  Chemically synthesized
uccuggccucuuccaugaugaug

SEQ ID NO: 66247 - RNA, 23 nt, Artificial Sequence
  Chemically synthesized
ccauguggugaauguguaccugu

SEQ ID NO: 66248 - RNA, 23 nt, Artificial Sequence
  Chemically synthesized
gccauguggugaauguguaccug

SEQ ID NO: 66249 - RNA, 23 nt, Artificial Sequence
  Chemically synthesized
ggccauguggugaauguguaccu

SEQ ID NO: 66250 - RNA, 23 nt, Artificial Sequence
  Chemically synthesized
gggccauguggugaauguguacc

SEQ ID NO: 66251 - RNA, 23 nt, Artificial Sequence
  Chemically synthesized
ugggccauguggugaauguguac

SEQ ID NO: 66252 - RNA, 23 nt, Artificial Sequence
  Chemically synthesized
uccucacagucuuacacagugug

SEQ ID NO: 66253 - RNA, 23 nt, Artificial Sequence
  Chemically synthesized
guccucacagucuuacacagugu

SEQ ID NO: 66254 - RNA, 23 nt, Artificial Sequence
  Chemically synthesized
gggaagauuuucacuucaugcug

SEQ ID NO: 66255 - RNA, 23 nt, Artificial Sequence
  Chemically synthesized
ugggaagauuuucacuucaugcu

SEQ ID NO: 66256 - RNA, 23 nt, Artificial Sequence
  Chemically synthesized
augggaagauuuucacuucaugc

SEQ ID NO: 66257 - RNA, 23 nt, Artificial Sequence
  Chemically synthesized
ggaggaacugacaugggaagauu

SEQ ID NO: 66258 - RNA, 23 nt, Artificial Sequence
  Chemically synthesized
aggaggaacugacaugggaagau

SEQ ID NO: 66259 - RNA, 23 nt, Artificial Sequence
  Chemically synthesized
aaggaggaacugacaugggaaga

SEQ ID NO: 66260 - RNA, 23 nt, Artificial Sequence
  Chemically synthesized
caaggaggaacugacaugggaag

SEQ ID NO: 66261 - RNA, 23 nt, Artificial Sequence
  Chemically synthesized
acaaggaggaacugacaugggaa

SEQ ID NO: 66262 - RNA, 23 nt, Artificial Sequence
  Chemically synthesized
agaucuccaacaacugccugucc

SEQ ID NO: 66263 - RNA, 23 nt, Artificial Sequence
  Chemically synthesized
gagaucuccaacaacugccuguc

SEQ ID NO: 66264 - RNA, 23 nt, Artificial Sequence
  Chemically synthesized
cgagaucuccaacaacugccugu

SEQ ID NO: 66265 - RNA, 23 nt, Artificial Sequence
  Chemically synthesized
ucgagaucuccaacaacugccug

SEQ ID NO: 66266 - RNA, 23 nt, Artificial Sequence
  Chemically synthesized
aucgagaucuccaacaacugccu

SEQ ID NO: 66267 - RNA, 23 nt, Artificial Sequence
  Chemically synthesized
uguuuaacuuggaggaagagcgg

SEQ ID NO: 66268 - RNA, 23 nt, Artificial Sequence
  Chemically synthesized
aguaugaccuggugcugcuguuu

SEQ ID NO: 66269 - RNA, 23 nt, Artificial Sequence
  Chemically synthesized
ggucaacuucguccuguccagca

SEQ ID NO: 66270 - RNA, 23 nt, Artificial Sequence
  Chemically synthesized
aggucaacuucguccuguccagc

SEQ ID NO: 66271 - RNA, 23 nt, Artificial Sequence
  Chemically synthesized
aaggucaacuucguccuguccag

SEQ ID NO: 66272 - RNA, 23 nt, Artificial Sequence
  Chemically synthesized
caaugacacuguacuggaggcca

SEQ ID NO: 66273 - RNA, 23 nt, Artificial Sequence
  Chemically synthesized
ccauaccuccuccucuucugggc

SEQ ID NO: 66274 - RNA, 23 nt, Artificial Sequence
  Chemically synthesized
cccauaccuccuccucuucuggg

SEQ ID NO: 66275 - RNA, 23 nt, Artificial Sequence
  Chemically synthesized
ggugaguguaaggaugcaguggg

SEQ ID NO: 66276 - RNA, 23 nt, Artificial Sequence
  Chemically synthesized
ugagcccuucuucaacucccugc

SEQ ID NO: 66277 - RNA, 23 nt, Artificial Sequence
  Chemically synthesized
uugagcccuucuucaacucccug

SEQ ID NO: 66278 - RNA, 23 nt, Artificial Sequence
  Chemically synthesized
uuugagcccuucuucaacucccu

SEQ ID NO: 66279 - RNA, 23 nt, Artificial Sequence
  Chemically synthesized
gcauggacacuucugguuggggc

SEQ ID NO: 66280 - RNA, 23 nt, Artificial Sequence
  Chemically synthesized
ccucuacauccugcucuaugucc

SEQ ID NO: 66281 - RNA, 23 nt, Artificial Sequence
  Chemically synthesized
ugacccaccaccucuacauccug

SEQ ID NO: 66282 - RNA, 23 nt, Artificial Sequence
  Chemically synthesized
cugacccaccaccucuacauccu

SEQ ID NO: 66283 - RNA, 23 nt, Artificial Sequence
  Chemically synthesized
gcugacccaccaccucuacaucc

SEQ ID NO: 66284 - RNA, 23 nt, Artificial Sequence
  Chemically synthesized
ggcugacccaccaccucuacauc

SEQ ID NO: 66285 - RNA, 23 nt, Artificial Sequence
  Chemically synthesized
uggcugacccaccaccucuacau

SEQ ID NO: 66286 - RNA, 23 nt, Artificial Sequence
  Chemically synthesized
ugauccuggccaucauguauguc

SEQ ID NO: 66287 - RNA, 23 nt, Artificial Sequence
  Chemically synthesized
cugauccuggccaucauguaugu

SEQ ID NO: 66288 - RNA, 23 nt, Artificial Sequence
  Chemically synthesized
gcaaccucaucaccuuccugcga

SEQ ID NO: 66289 - RNA, 23 nt, Artificial Sequence
  Chemically synthesized
cgcaaccucaucaccuuccugcg

SEQ ID NO: 66290 - RNA, 23 nt, Artificial Sequence
  Chemically synthesized
ccgcaaccucaucaccuuccugc

SEQ ID NO: 66291 - RNA, 23 nt, Artificial Sequence
  Chemically synthesized
gccgcaaccucaucaccuuccug

SEQ ID NO: 66292 - RNA, 23 nt, Artificial Sequence
  Chemically synthesized
ugccgcaaccucaucaccuuccu

SEQ ID NO: 66293 - RNA, 23 nt, Artificial Sequence
  Chemically synthesized
acaucuugcucaccaugugccgc

SEQ ID NO: 66294 - RNA, 23 nt, Artificial Sequence
  Chemically synthesized
uacaucuugcucaccaugugccg

SEQ ID NO: 66295 - RNA, 23 nt, Artificial Sequence
  Chemically synthesized
cuacaucuugcucaccaugugcc

SEQ ID NO: 66296 - RNA, 23 nt, Artificial Sequence
  Chemically synthesized
agguuuggcaagaagguaacguc

SEQ ID NO: 66297 - RNA, 23 nt, Artificial Sequence
  Chemically synthesized
gagguuuggcaagaagguaacgu

SEQ ID NO: 66298 - RNA, 23 nt, Artificial Sequence
  Chemically synthesized
ggagguuuggcaagaagguaacg

SEQ ID NO: 66299 - RNA, 23 nt, Artificial Sequence
  Chemically synthesized
cggagguuuggcaagaagguaac

SEQ ID NO: 66300 - RNA, 23 nt, Artificial Sequence
  Chemically synthesized
gcggagguuuggcaagaagguaa

SEQ ID NO: 66301 - RNA, 23 nt, Artificial Sequence
  Chemically synthesized
ggacaaggaggaacugacauggg

SEQ ID NO: 66302 - RNA, 23 nt, Artificial Sequence
  Chemically synthesized
aggacaaggaggaacugacaugg

SEQ ID NO: 66303 - RNA, 23 nt, Artificial Sequence
  Chemically synthesized
caggacaaggaggaacugacaug

SEQ ID NO: 66304 - RNA, 23 nt, Artificial Sequence
  Chemically synthesized
ccaggacaaggaggaacugacau

SEQ ID NO: 66305 - RNA, 23 nt, Artificial Sequence
  Chemically synthesized
uccaggacaaggaggaacugaca

SEQ ID NO: 66306 - RNA, 23 nt, Artificial Sequence
  Chemically synthesized
gaaauuucaagaggcuccagggc

SEQ ID NO: 66307 - RNA, 23 nt, Artificial Sequence
  Chemically synthesized
agaaauuucaagaggcuccaggg

SEQ ID NO: 66308 - RNA, 23 nt, Artificial Sequence
  Chemically synthesized
gagaaauuucaagaggcuccagg

SEQ ID NO: 66309 - RNA, 23 nt, Artificial Sequence
  Chemically synthesized
gugcucccucuguuguucgugac

SEQ ID NO: 66310 - RNA, 23 nt, Artificial Sequence
  Chemically synthesized
ugugcucccucuguuguucguga

SEQ ID NO: 66311 - RNA, 23 nt, Artificial Sequence
  Chemically synthesized
ccaucguccuugaacaauuugug

SEQ ID NO: 66312 - RNA, 23 nt, Artificial Sequence
  Chemically synthesized
accaucguccuugaacaauuugu

SEQ ID NO: 66313 - RNA, 23 nt, Artificial Sequence
  Chemically synthesized
caccaucguccuugaacaauuug

SEQ ID NO: 66314 - RNA, 23 nt, Artificial Sequence
  Chemically synthesized
gcaccaucguccuugaacaauuu

SEQ ID NO: 66315 - RNA, 23 nt, Artificial Sequence
  Chemically synthesized
agcaccaucguccuugaacaauu

SEQ ID NO: 66316 - RNA, 23 nt, Artificial Sequence
  Chemically synthesized
uugaagaugugcgggauuucugg

SEQ ID NO: 66317 - RNA, 23 nt, Artificial Sequence
  Chemically synthesized
guugaagaugugcgggauuucug

SEQ ID NO: 66318 - RNA, 23 nt, Artificial Sequence
  Chemically synthesized
gcuaucacgugcuuucagaccug

SEQ ID NO: 66319 - RNA, 23 nt, Artificial Sequence
  Chemically synthesized
ggcuaucacgugcuuucagaccu

SEQ ID NO: 66320 - RNA, 23 nt, Artificial Sequence
  Chemically synthesized
uggcuaucacgugcuuucagacc

SEQ ID NO: 66321 - RNA, 23 nt, Artificial Sequence
  Chemically synthesized
uuggcuaucacgugcuuucagac

SEQ ID NO: 66322 - RNA, 23 nt, Artificial Sequence
  Chemically synthesized
uuuggcuaucacgugcuuucaga

SEQ ID NO: 66323 - RNA, 23 nt, Artificial Sequence
  Chemically synthesized
ccaauaccuauguaugcaaugcu

SEQ ID NO: 66324 - RNA, 23 nt, Artificial Sequence
  Chemically synthesized
cccaauaccuauguaugcaaugc

SEQ ID NO: 66325 - RNA, 23 nt, Artificial Sequence
  Chemically synthesized
gcccaauaccuauguaugcaaug

SEQ ID NO: 66326 - RNA, 23 nt, Artificial Sequence
  Chemically synthesized
ggcccaauaccuauguaugcaau

SEQ ID NO: 66327 - RNA, 23 nt, Artificial Sequence
  Chemically synthesized
uggcccaauaccuauguaugcaa

SEQ ID NO: 66328 - RNA, 23 nt, Artificial Sequence
  Chemically synthesized
caguugagcagagguuugagccc

SEQ ID NO: 66329 - RNA, 23 nt, Artificial Sequence
  Chemically synthesized
ugugcacaucuacaucacccagc

SEQ ID NO: 66330 - RNA, 23 nt, Artificial Sequence
  Chemically synthesized
cugugcacaucuacaucacccag

SEQ ID NO: 66331 - RNA, 23 nt, Artificial Sequence
  Chemically synthesized
gucuucaagucauccgucagcug

SEQ ID NO: 66332 - RNA, 23 nt, Artificial Sequence
  Chemically synthesized
ggucuucaagucauccgucagcu

SEQ ID NO: 66333 - RNA, 23 nt, Artificial Sequence
  Chemically synthesized
uggucuucaagucauccgucagc

SEQ ID NO: 66334 - RNA, 23 nt, Artificial Sequence
  Chemically synthesized
cuggucuucaagucauccgucag

SEQ ID NO: 66335 - RNA, 23 nt, Artificial Sequence
  Chemically synthesized
ccuggucuucaagucauccguca

SEQ ID NO: 66336 - RNA, 23 nt, Artificial Sequence
  Chemically synthesized
caucauccaugguagcuuugccc

SEQ ID NO: 66337 - RNA, 23 nt, Artificial Sequence
  Chemically synthesized
guguaccuguucuccaucagccc

SEQ ID NO: 66338 - RNA, 23 nt, Artificial Sequence
  Chemically synthesized
uguguaccuguucuccaucagcc

SEQ ID NO: 66339 - RNA, 23 nt, Artificial Sequence
  Chemically synthesized
auguguaccuguucuccaucagc

SEQ ID NO: 66340 - RNA, 23 nt, Artificial Sequence
  Chemically synthesized
aauguguaccuguucuccaucag

SEQ ID NO: 66341 - RNA, 23 nt, Artificial Sequence
  Chemically synthesized
gaauguguaccuguucuccauca

SEQ ID NO: 66342 - RNA, 23 nt, Artificial Sequence
  Chemically synthesized
ugaauguguaccuguucuccauc

SEQ ID NO: 66343 - RNA, 23 nt, Artificial Sequence
  Chemically synthesized
gugaauguguaccuguucuccau

SEQ ID NO: 66344 - RNA, 23 nt, Artificial Sequence
  Chemically synthesized
ggugaauguguaccuguucucca

SEQ ID NO: 66345 - RNA, 23 nt, Artificial Sequence
  Chemically synthesized
uggugaauguguaccuguucucc

SEQ ID NO: 66346 - RNA, 23 nt, Artificial Sequence
  Chemically synthesized
guggugaauguguaccuguucuc

SEQ ID NO: 66347 - RNA, 23 nt, Artificial Sequence
  Chemically synthesized
uguggugaauguguaccuguucu

SEQ ID NO: 66348 - RNA, 23 nt, Artificial Sequence
  Chemically synthesized
gguuuggcaagaagguaacguca

SEQ ID NO: 66349 - RNA, 23 nt, Artificial Sequence
  Chemically synthesized
gacauugagacugaguugacacc

SEQ ID NO: 66350 - RNA, 23 nt, Artificial Sequence
  Chemically synthesized
cucagugccuggauuguugcccg

SEQ ID NO: 66351 - RNA, 23 nt, Artificial Sequence
  Chemically synthesized
gcucagugccuggauuguugccc

SEQ ID NO: 66352 - RNA, 23 nt, Artificial Sequence
  Chemically synthesized
ugcucagugccuggauuguugcc

SEQ ID NO: 66353 - RNA, 23 nt, Artificial Sequence
  Chemically synthesized
cugcucagugccuggauuguugc

SEQ ID NO: 66354 - RNA, 23 nt, Artificial Sequence
  Chemically synthesized
ccugcucagugccuggauuguug

SEQ ID NO: 66355 - RNA, 23 nt, Artificial Sequence
  Chemically synthesized
gugugcucccucuguuguucgug

SEQ ID NO: 66356 - RNA, 23 nt, Artificial Sequence
  Chemically synthesized
cgugugcucccucuguuguucgu

SEQ ID NO: 66357 - RNA, 23 nt, Artificial Sequence
  Chemically synthesized
guguugguugaagaugugcggga

SEQ ID NO: 66358 - RNA, 23 nt, Artificial Sequence
  Chemically synthesized
cccagcuuccugcagaaaacacu

SEQ ID NO: 66359 - RNA, 23 nt, Artificial Sequence
  Chemically synthesized
gcccagcuuccugcagaaaacac

SEQ ID NO: 66360 - RNA, 23 nt, Artificial Sequence
  Chemically synthesized
ugcccagcuuccugcagaaaaca

SEQ ID NO: 66361 - RNA, 23 nt, Artificial Sequence
  Chemically synthesized
cugcccagcuuccugcagaaaac

SEQ ID NO: 66362 - RNA, 23 nt, Artificial Sequence
  Chemically synthesized
gcugcccagcuuccugcagaaaa

SEQ ID NO: 66363 - RNA, 23 nt, Artificial Sequence
  Chemically synthesized
ugcuuucagaccuggugagcgug

SEQ ID NO: 66364 - RNA, 23 nt, Artificial Sequence
  Chemically synthesized
gugcuuucagaccuggugagcgu

SEQ ID NO: 66365 - RNA, 23 nt, Artificial Sequence
  Chemically synthesized
cgugcuuucagaccuggugagcg

SEQ ID NO: 66366 - RNA, 23 nt, Artificial Sequence
  Chemically synthesized
acgugcuuucagaccuggugagc

SEQ ID NO: 66367 - RNA, 23 nt, Artificial Sequence
  Chemically synthesized
cacgugcuuucagaccuggugag

SEQ ID NO: 66368 - RNA, 23 nt, Artificial Sequence
  Chemically synthesized
aaguacuaugugugugcaugucu

SEQ ID NO: 66369 - RNA, 23 nt, Artificial Sequence
  Chemically synthesized
agccuucucugauuucccaccuc

SEQ ID NO: 66370 - RNA, 23 nt, Artificial Sequence
  Chemically synthesized
cagccuucucugauuucccaccu

SEQ ID NO: 66371 - RNA, 23 nt, Artificial Sequence
  Chemically synthesized
ucagccuucucugauuucccacc

SEQ ID NO: 66372 - RNA, 23 nt, Artificial Sequence
  Chemically synthesized
cucagccuucucugauuucccac

SEQ ID NO: 66373 - RNA, 23 nt, Artificial Sequence
  Chemically synthesized
ccucagccuucucugauuuccca

SEQ ID NO: 66374 - RNA, 23 nt, Artificial Sequence
  Chemically synthesized
ggugcagcgauuugauggguggu

SEQ ID NO: 66375 - RNA, 23 nt, Artificial Sequence
  Chemically synthesized
aggugcagcgauuugaugggugg

SEQ ID NO: 66376 - RNA, 23 nt, Artificial Sequence
  Chemically synthesized
gaggugcagcgauuugaugggug

SEQ ID NO: 66377 - RNA, 23 nt, Artificial Sequence
  Chemically synthesized
ucugugcacaucuacaucaccca

SEQ ID NO: 66378 - RNA, 23 nt, Artificial Sequence
  Chemically synthesized
accuggucuucaagucauccguc

SEQ ID NO: 66379 - RNA, 23 nt, Artificial Sequence
  Chemically synthesized
gaccuggucuucaagucauccgu

SEQ ID NO: 66380 - RNA, 23 nt, Artificial Sequence
  Chemically synthesized
ccuuuugccuccauccucaaaga

SEQ ID NO: 66381 - RNA, 23 nt, Artificial Sequence
  Chemically synthesized
cccuuuugccuccauccucaaag

SEQ ID NO: 66382 - RNA, 23 nt, Artificial Sequence
  Chemically synthesized
ccccuuuugccuccauccucaaa

SEQ ID NO: 66383 - RNA, 23 nt, Artificial Sequence
  Chemically synthesized
accccuuuugccuccauccucaa

SEQ ID NO: 66384 - RNA, 23 nt, Artificial Sequence
  Chemically synthesized
caccccuuuugccuccauccuca

SEQ ID NO: 66385 - RNA, 23 nt, Artificial Sequence
  Chemically synthesized
agaugugccagauacccaaagcu

SEQ ID NO: 66386 - RNA, 23 nt, Artificial Sequence
  Chemically synthesized
cagaugugccagauacccaaagc

SEQ ID NO: 66387 - RNA, 23 nt, Artificial Sequence
  Chemically synthesized
acagaugugccagauacccaaag

SEQ ID NO: 66388 - RNA, 23 nt, Artificial Sequence
  Chemically synthesized
gacagaugugccagauacccaaa

SEQ ID NO: 66389 - RNA, 23 nt, Artificial Sequence
  Chemically synthesized
ugacagaugugccagauacccaa

SEQ ID NO: 66390 - RNA, 23 nt, Artificial Sequence
  Chemically synthesized
ucuauguccugcucaucauccau

SEQ ID NO: 66391 - RNA, 23 nt, Artificial Sequence
  Chemically synthesized
cucuauguccugcucaucaucca

SEQ ID NO: 66392 - RNA, 23 nt, Artificial Sequence
  Chemically synthesized
gcucuauguccugcucaucaucc

SEQ ID NO: 66393 - RNA, 23 nt, Artificial Sequence
  Chemically synthesized
ugcucuauguccugcucaucauc

SEQ ID NO: 66394 - RNA, 23 nt, Artificial Sequence
  Chemically synthesized
cugcucuauguccugcucaucau

SEQ ID NO: 66395 - RNA, 23 nt, Artificial Sequence
  Chemically synthesized
ccaccaccucuacauccugcucu

SEQ ID NO: 66396 - RNA, 23 nt, Artificial Sequence
  Chemically synthesized
ggcggagguuuggcaagaaggua

SEQ ID NO: 66397 - RNA, 23 nt, Artificial Sequence
  Chemically synthesized
cggcggagguuuggcaagaaggu

SEQ ID NO: 66398 - RNA, 23 nt, Artificial Sequence
  Chemically synthesized
ggaacugacaugggaagauuuuc

SEQ ID NO: 66399 - RNA, 23 nt, Artificial Sequence
  Chemically synthesized
aggaacugacaugggaagauuuu

SEQ ID NO: 66400 - RNA, 23 nt, Artificial Sequence
  Chemically synthesized
gaggaacugacaugggaagauuu

SEQ ID NO: 66401 - RNA, 23 nt, Artificial Sequence
  Chemically synthesized
gacaaggaggaacugacauggga

SEQ ID NO: 66402 - RNA, 23 nt, Artificial Sequence
  Chemically synthesized
cuccuggagaccuuuuucaggca

SEQ ID NO: 66403 - RNA, 23 nt, Artificial Sequence
  Chemically synthesized
ccuccuggagaccuuuuucaggc

SEQ ID NO: 66404 - RNA, 23 nt, Artificial Sequence
  Chemically synthesized
accuccuggagaccuuuuucagg

SEQ ID NO: 66405 - RNA, 23 nt, Artificial Sequence
  Chemically synthesized
caccuccuggagaccuuuuucag

SEQ ID NO: 66406 - RNA, 23 nt, Artificial Sequence
  Chemically synthesized
gcaccuccuggagaccuuuuuca

SEQ ID NO: 66407 - RNA, 23 nt, Artificial Sequence
  Chemically synthesized
ggaccauguguugguugaagaug

SEQ ID NO: 66408 - RNA, 23 nt, Artificial Sequence
  Chemically synthesized
aggaccauguguugguugaagau

SEQ ID NO: 66409 - RNA, 23 nt, Artificial Sequence
  Chemically synthesized
gaggaccauguguugguugaaga

SEQ ID NO: 66410 - RNA, 23 nt, Artificial Sequence
  Chemically synthesized
agaggaccauguguugguugaag

SEQ ID NO: 66411 - RNA, 23 nt, Artificial Sequence
  Chemically synthesized
gagaggaccauguguugguugaa

SEQ ID NO: 66412 - RNA, 23 nt, Artificial Sequence
  Chemically synthesized
ucaagugucuccagagcucuccg

SEQ ID NO: 66413 - RNA, 23 nt, Artificial Sequence
  Chemically synthesized
cucaagugucuccagagcucucc

SEQ ID NO: 66414 - RNA, 23 nt, Artificial Sequence
  Chemically synthesized
acucaagugucuccagagcucuc

SEQ ID NO: 66415 - RNA, 23 nt, Artificial Sequence
  Chemically synthesized
aacucaagugucuccagagcucu

SEQ ID NO: 66416 - RNA, 23 nt, Artificial Sequence
  Chemically synthesized
gaacucaagugucuccagagcuc

SEQ ID NO: 66417 - RNA, 23 nt, Artificial Sequence
  Chemically synthesized
gaacaucgcuguguaugaguggc

SEQ ID NO: 66418 - RNA, 23 nt, Artificial Sequence
  Chemically synthesized
agaacaucgcuguguaugagugg

SEQ ID NO: 66419 - RNA, 23 nt, Artificial Sequence
  Chemically synthesized
cagaacaucgcuguguaugagug

SEQ ID NO: 66420 - RNA, 23 nt, Artificial Sequence
  Chemically synthesized
ccagaacaucgcuguguaugagu

SEQ ID NO: 66421 - RNA, 23 nt, Artificial Sequence
  Chemically synthesized
accagaacaucgcuguguaugag

SEQ ID NO: 66422 - RNA, 23 nt, Artificial Sequence
  Chemically synthesized
acaaccucauggagcacagaugg

SEQ ID NO: 66423 - RNA, 23 nt, Artificial Sequence
  Chemically synthesized
aacaaccucauggagcacagaug

SEQ ID NO: 66424 - RNA, 23 nt, Artificial Sequence
  Chemically synthesized
caacaaccucauggagcacagau

SEQ ID NO: 66425 - RNA, 23 nt, Artificial Sequence
  Chemically synthesized
acaacaaccucauggagcacaga

SEQ ID NO: 66426 - RNA, 23 nt, Artificial Sequence
  Chemically synthesized
uacaacaaccucauggagcacag

SEQ ID NO: 66427 - RNA, 23 nt, Artificial Sequence
  Chemically synthesized
cucuguucuuccuauuucuggcu

SEQ ID NO: 66428 - RNA, 23 nt, Artificial Sequence
  Chemically synthesized
uggagaucagcguggugaaggcg

SEQ ID NO: 66429 - RNA, 23 nt, Artificial Sequence
  Chemically synthesized
guggagaucagcguggugaaggc

SEQ ID NO: 66430 - RNA, 23 nt, Artificial Sequence
  Chemically synthesized
gguggagaucagcguggugaagg

SEQ ID NO: 66431 - RNA, 23 nt, Artificial Sequence
  Chemically synthesized
agguggagaucagcguggugaag

SEQ ID NO: 66432 - RNA, 23 nt, Artificial Sequence
  Chemically synthesized
aagguggagaucagcguggugaa

SEQ ID NO: 66433 - RNA, 23 nt, Artificial Sequence
  Chemically synthesized
gcgugugcucccucuguuguucg

SEQ ID NO: 66434 - RNA, 23 nt, Artificial Sequence
  Chemically synthesized
agcgugugcucccucuguuguuc

SEQ ID NO: 66435 - RNA, 23 nt, Artificial Sequence
  Chemically synthesized
cagcgugugcucccucuguuguu

SEQ ID NO: 66436 - RNA, 23 nt, Artificial Sequence
  Chemically synthesized
cuccaagaaggagauugaagaaa

SEQ ID NO: 66437 - RNA, 23 nt, Artificial Sequence
  Chemically synthesized
ucuccaagaaggagauugaagaa

SEQ ID NO: 66438 - RNA, 23 nt, Artificial Sequence
  Chemically synthesized
uucuccaagaaggagauugaaga

SEQ ID NO: 66439 - RNA, 23 nt, Artificial Sequence
  Chemically synthesized
ucgcuguguaugaguggcugccc

SEQ ID NO: 66440 - RNA, 23 nt, Artificial Sequence
  Chemically synthesized
aucgcuguguaugaguggcugcc

SEQ ID NO: 66441 - RNA, 23 nt, Artificial Sequence
  Chemically synthesized
caucgcuguguaugaguggcugc

SEQ ID NO: 66442 - RNA, 23 nt, Artificial Sequence
  Chemically synthesized
acaucgcuguguaugaguggcug

SEQ ID NO: 66443 - RNA, 23 nt, Artificial Sequence
  Chemically synthesized
aacaucgcuguguaugaguggcu

SEQ ID NO: 66444 - RNA, 23 nt, Artificial Sequence
  Chemically synthesized
cuaauuucacccaagguuuuaag

SEQ ID NO: 66445 - RNA, 23 nt, Artificial Sequence
  Chemically synthesized
acuaauuucacccaagguuuuaa

SEQ ID NO: 66446 - RNA, 23 nt, Artificial Sequence
  Chemically synthesized
aacuaauuucacccaagguuuua

SEQ ID NO: 66447 - RNA, 23 nt, Artificial Sequence
  Chemically synthesized
guaagaagaucuacuucaucugg

SEQ ID NO: 66448 - RNA, 23 nt, Artificial Sequence
  Chemically synthesized
uguaagaagaucuacuucaucug

SEQ ID NO: 66449 - RNA, 23 nt, Artificial Sequence
  Chemically synthesized
cuguaagaagaucuacuucaucu

SEQ ID NO: 66450 - RNA, 23 nt, Artificial Sequence
  Chemically synthesized
ucuguaagaagaucuacuucauc

SEQ ID NO: 66451 - RNA, 23 nt, Artificial Sequence
  Chemically synthesized
uucuguaagaagaucuacuucau

SEQ ID NO: 66452 - RNA, 23 nt, Artificial Sequence
  Chemically synthesized
ucagcugccaaguguucuguaag

SEQ ID NO: 66453 - RNA, 23 nt, Artificial Sequence
  Chemically synthesized
gucagcugccaaguguucuguaa

SEQ ID NO: 66454 - RNA, 23 nt, Artificial Sequence
  Chemically synthesized
ggaagaagguggagaucagcgug

SEQ ID NO: 66455 - RNA, 23 nt, Artificial Sequence
  Chemically synthesized
cggaagaagguggagaucagcgu

SEQ ID NO: 66456 - RNA, 23 nt, Artificial Sequence
  Chemically synthesized
ccggaagaagguggagaucagcg

SEQ ID NO: 66457 - RNA, 23 nt, Artificial Sequence
  Chemically synthesized
gccggaagaagguggagaucagc

SEQ ID NO: 66458 - RNA, 23 nt, Artificial Sequence
  Chemically synthesized
agccggaagaagguggagaucag

SEQ ID NO: 66459 - RNA, 23 nt, Artificial Sequence
  Chemically synthesized
gcacucugcugcucaagaucccc

SEQ ID NO: 66460 - RNA, 23 nt, Artificial Sequence
  Chemically synthesized
cgcacucugcugcucaagauccc

SEQ ID NO: 66461 - RNA, 23 nt, Artificial Sequence
  Chemically synthesized
ccgcacucugcugcucaagaucc

SEQ ID NO: 66462 - RNA, 23 nt, Artificial Sequence
  Chemically synthesized
gccgcacucugcugcucaagauc

SEQ ID NO: 66463 - RNA, 23 nt, Artificial Sequence
  Chemically synthesized
cgccgcacucugcugcucaagau

SEQ ID NO: 66464 - RNA, 23 nt, Artificial Sequence
  Chemically synthesized
cccuguacaaccaggacuuaucc

SEQ ID NO: 66465 - RNA, 23 nt, Artificial Sequence
  Chemically synthesized
gcccuguacaaccaggacuuauc

SEQ ID NO: 66466 - RNA, 23 nt, Artificial Sequence
  Chemically synthesized
ugcccuguacaaccaggacuuau

SEQ ID NO: 66467 - RNA, 23 nt, Artificial Sequence
  Chemically synthesized
cugcccuguacaaccaggacuua

SEQ ID NO: 66468 - RNA, 23 nt, Artificial Sequence
  Chemically synthesized
gcugcccuguacaaccaggacuu

SEQ ID NO: 66469 - RNA, 23 nt, Artificial Sequence
  Chemically synthesized
ccagcuuccugcagaaaacacuc

SEQ ID NO: 66470 - RNA, 23 nt, Artificial Sequence
  Chemically synthesized
gcacguucuuucaucagacccug

SEQ ID NO: 66471 - RNA, 23 nt, Artificial Sequence
  Chemically synthesized
agcacguucuuucaucagacccu

SEQ ID NO: 66472 - RNA, 23 nt, Artificial Sequence
  Chemically synthesized
aagcacguucuuucaucagaccc

SEQ ID NO: 66473 - RNA, 23 nt, Artificial Sequence
  Chemically synthesized
uaagcacguucuuucaucagacc

SEQ ID NO: 66474 - RNA, 23 nt, Artificial Sequence
  Chemically synthesized
uuaagcacguucuuucaucagac

SEQ ID NO: 66475 - RNA, 23 nt, Artificial Sequence
  Chemically synthesized
ccccagggcuuugaguacaaguc

SEQ ID NO: 66476 - RNA, 23 nt, Artificial Sequence
  Chemically synthesized
gccccagggcuuugaguacaagu

SEQ ID NO: 66477 - RNA, 23 nt, Artificial Sequence
  Chemically synthesized
ggccccagggcuuugaguacaag

SEQ ID NO: 66478 - RNA, 23 nt, Artificial Sequence
  Chemically synthesized
auguccugcucaucauccauggu

SEQ ID NO: 66479 - RNA, 23 nt, Artificial Sequence
  Chemically synthesized
uauguccugcucaucauccaugg

SEQ ID NO: 66480 - RNA, 23 nt, Artificial Sequence
  Chemically synthesized
cuauguccugcucaucauccaug

SEQ ID NO: 66481 - RNA, 23 nt, Artificial Sequence
  Chemically synthesized
ugugggccauguggugaaugugu

SEQ ID NO: 66482 - RNA, 23 nt, Artificial Sequence
  Chemically synthesized
gugugggccauguggugaaugug

SEQ ID NO: 66483 - RNA, 23 nt, Artificial Sequence
  Chemically synthesized
agugugggccauguggugaaugu

SEQ ID NO: 66484 - RNA, 23 nt, Artificial Sequence
  Chemically synthesized
cagugugggccauguggugaaug

SEQ ID NO: 66485 - RNA, 23 nt, Artificial Sequence
  Chemically synthesized
acagugugggccauguggugaau

SEQ ID NO: 66486 - RNA, 23 nt, Artificial Sequence
  Chemically synthesized
ggacuuccaucgccucauugccu

SEQ ID NO: 66487 - RNA, 23 nt, Artificial Sequence
  Chemically synthesized
uggacuuccaucgccucauugcc

SEQ ID NO: 66488 - RNA, 23 nt, Artificial Sequence
  Chemically synthesized
guggacuuccaucgccucauugc

SEQ ID NO: 66489 - RNA, 23 nt, Artificial Sequence
  Chemically synthesized
cguggacuuccaucgccucauug

SEQ ID NO: 66490 - RNA, 23 nt, Artificial Sequence
  Chemically synthesized
ccguggacuuccaucgccucauu

SEQ ID NO: 66491 - RNA, 23 nt, Artificial Sequence
  Chemically synthesized
gcaauggcuaccuguccuuccga

SEQ ID NO: 66492 - RNA, 23 nt, Artificial Sequence
  Chemically synthesized
ggcaauggcuaccuguccuuccg

SEQ ID NO: 66493 - RNA, 23 nt, Artificial Sequence
  Chemically synthesized
uggcaauggcuaccuguccuucc

SEQ ID NO: 66494 - RNA, 23 nt, Artificial Sequence
  Chemically synthesized
auggcaauggcuaccuguccuuc

SEQ ID NO: 66495 - RNA, 23 nt, Artificial Sequence
  Chemically synthesized
gauggcaauggcuaccuguccuu

SEQ ID NO: 66496 - RNA, 23 nt, Artificial Sequence
  Chemically synthesized
ccggcuccggaugagaaauuuca

SEQ ID NO: 66497 - RNA, 23 nt, Artificial Sequence
  Chemically synthesized
cccggcuccggaugagaaauuuc

SEQ ID NO: 66498 - RNA, 23 nt, Artificial Sequence
  Chemically synthesized
gcccggcuccggaugagaaauuu

SEQ ID NO: 66499 - RNA, 23 nt, Artificial Sequence
  Chemically synthesized
ugcccggcuccggaugagaaauu

SEQ ID NO: 66500 - RNA, 23 nt, Artificial Sequence
  Chemically synthesized
cguccuugaacaauuugugcggc

SEQ ID NO: 66501 - RNA, 23 nt, Artificial Sequence
  Chemically synthesized
ucguccuugaacaauuugugcgg

SEQ ID NO: 66502 - RNA, 23 nt, Artificial Sequence
  Chemically synthesized
aucguccuugaacaauuugugcg

SEQ ID NO: 66503 - RNA, 23 nt, Artificial Sequence
  Chemically synthesized
caucguccuugaacaauuugugc

SEQ ID NO: 66504 - RNA, 23 nt, Artificial Sequence
  Chemically synthesized
ccauggcaagccauuuacagaaa

SEQ ID NO: 66505 - RNA, 23 nt, Artificial Sequence
  Chemically synthesized
ugcuggcaucuuagaacccuccc

SEQ ID NO: 66506 - RNA, 23 nt, Artificial Sequence
  Chemically synthesized
augcuggcaucuuagaacccucc

SEQ ID NO: 66507 - RNA, 23 nt, Artificial Sequence
  Chemically synthesized
gaugcuggcaucuuagaacccuc

SEQ ID NO: 66508 - RNA, 23 nt, Artificial Sequence
  Chemically synthesized
ggaugcuggcaucuuagaacccu

SEQ ID NO: 66509 - RNA, 23 nt, Artificial Sequence
  Chemically synthesized
gucuagggacuagagugagaagu

SEQ ID NO: 66510 - RNA, 23 nt, Artificial Sequence
  Chemically synthesized
ugucuagggacuagagugagaag

SEQ ID NO: 66511 - RNA, 23 nt, Artificial Sequence
  Chemically synthesized
gugucuagggacuagagugagaa

SEQ ID NO: 66512 - RNA, 23 nt, Artificial Sequence
  Chemically synthesized
gccucagccuucucugauuuccc

SEQ ID NO: 66513 - RNA, 23 nt, Artificial Sequence
  Chemically synthesized
ugccucagccuucucugauuucc

SEQ ID NO: 66514 - RNA, 23 nt, Artificial Sequence
  Chemically synthesized
cugccucagccuucucugauuuc

SEQ ID NO: 66515 - RNA, 23 nt, Artificial Sequence
  Chemically synthesized
gcugccucagccuucucugauuu

SEQ ID NO: 66516 - RNA, 23 nt, Artificial Sequence
  Chemically synthesized
ggcugccucagccuucucugauu

SEQ ID NO: 66517 - RNA, 23 nt, Artificial Sequence
  Chemically synthesized
aggccugucagcucaucaacagg

SEQ ID NO: 66518 - RNA, 23 nt, Artificial Sequence
  Chemically synthesized
aaggccugucagcucaucaacag

SEQ ID NO: 66519 - RNA, 23 nt, Artificial Sequence
  Chemically synthesized
aaaggccugucagcucaucaaca

SEQ ID NO: 66520 - RNA, 23 nt, Artificial Sequence
  Chemically synthesized
aaaaggccugucagcucaucaac

SEQ ID NO: 66521 - RNA, 23 nt, Artificial Sequence
  Chemically synthesized
gaaaaggccugucagcucaucaa

SEQ ID NO: 66522 - RNA, 23 nt, Artificial Sequence
  Chemically synthesized
ugagauccuucaucgagaucucc

SEQ ID NO: 66523 - RNA, 23 nt, Artificial Sequence
  Chemically synthesized
cugagauccuucaucgagaucuc

SEQ ID NO: 66524 - RNA, 23 nt, Artificial Sequence
  Chemically synthesized
gcugagauccuucaucgagaucu

SEQ ID NO: 66525 - RNA, 23 nt, Artificial Sequence
  Chemically synthesized
ugcugagauccuucaucgagauc

SEQ ID NO: 66526 - RNA, 23 nt, Artificial Sequence
  Chemically synthesized
augcugagauccuucaucgagau

SEQ ID NO: 66527 - RNA, 23 nt, Artificial Sequence
  Chemically synthesized
uggccucauuuccaaggaugagu

SEQ ID NO: 66528 - RNA, 23 nt, Artificial Sequence
  Chemically synthesized
auggccucauuuccaaggaugag

SEQ ID NO: 66529 - RNA, 23 nt, Artificial Sequence
  Chemically synthesized
aauggccucauuuccaaggauga

SEQ ID NO: 66530 - RNA, 23 nt, Artificial Sequence
  Chemically synthesized
gaauggccucauuuccaaggaug

SEQ ID NO: 66531 - RNA, 23 nt, Artificial Sequence
  Chemically synthesized
ggaauggccucauuuccaaggau

SEQ ID NO: 66532 - RNA, 23 nt, Artificial Sequence
  Chemically synthesized
cagcaccaucguccuugaacaau

SEQ ID NO: 66533 - RNA, 23 nt, Artificial Sequence
  Chemically synthesized
ucagcaccaucguccuugaacaa

SEQ ID NO: 66534 - RNA, 23 nt, Artificial Sequence
  Chemically synthesized
uucagcaccaucguccuugaaca

SEQ ID NO: 66535 - RNA, 23 nt, Artificial Sequence
  Chemically synthesized
ccauguguugguugaagaugugc

SEQ ID NO: 66536 - RNA, 23 nt, Artificial Sequence
  Chemically synthesized
accauguguugguugaagaugug

SEQ ID NO: 66537 - RNA, 23 nt, Artificial Sequence
  Chemically synthesized
gaccauguguugguugaagaugu

SEQ ID NO: 66538 - RNA, 23 nt, Artificial Sequence
  Chemically synthesized
ugagcacccaagccuacaaagug

SEQ ID NO: 66539 - RNA, 23 nt, Artificial Sequence
  Chemically synthesized
gugagcacccaagccuacaaagu

SEQ ID NO: 66540 - RNA, 23 nt, Artificial Sequence
  Chemically synthesized
cgugagcacccaagccuacaaag

SEQ ID NO: 66541 - RNA, 23 nt, Artificial Sequence
  Chemically synthesized
ccgugagcacccaagccuacaaa

SEQ ID NO: 66542 - RNA, 23 nt, Artificial Sequence
  Chemically synthesized
gccgugagcacccaagccuacaa

SEQ ID NO: 66543 - RNA, 23 nt, Artificial Sequence
  Chemically synthesized
cuggcccaauaccuauguaugca

SEQ ID NO: 66544 - RNA, 23 nt, Artificial Sequence
  Chemically synthesized
acccauggcaagccauuuacaga

SEQ ID NO: 66545 - RNA, 23 nt, Artificial Sequence
  Chemically synthesized
gacccauggcaagccauuuacag

SEQ ID NO: 66546 - RNA, 23 nt, Artificial Sequence
  Chemically synthesized
ggacccauggcaagccauuuaca

SEQ ID NO: 66547 - RNA, 23 nt, Artificial Sequence
  Chemically synthesized
uggacccauggcaagccauuuac

SEQ ID NO: 66548 - RNA, 23 nt, Artificial Sequence
  Chemically synthesized
cuggacccauggcaagccauuua

SEQ ID NO: 66549 - RNA, 23 nt, Artificial Sequence
  Chemically synthesized
cuaugcagauggcguguaccagc

SEQ ID NO: 66550 - RNA, 23 nt, Artificial Sequence
  Chemically synthesized
gcauggaugcuggcaucuuagaa

SEQ ID NO: 66551 - RNA, 23 nt, Artificial Sequence
  Chemically synthesized
agcauggaugcuggcaucuuaga

SEQ ID NO: 66552 - RNA, 23 nt, Artificial Sequence
  Chemically synthesized
gagcauggaugcuggcaucuuag

SEQ ID NO: 66553 - RNA, 23 nt, Artificial Sequence
  Chemically synthesized
ggagcauggaugcuggcaucuua

SEQ ID NO: 66554 - RNA, 23 nt, Artificial Sequence
  Chemically synthesized
gggagcauggaugcuggcaucuu

SEQ ID NO: 66555 - RNA, 23 nt, Artificial Sequence
  Chemically synthesized
ggugguacaacaaccucauggag

SEQ ID NO: 66556 - RNA, 23 nt, Artificial Sequence
  Chemically synthesized
gggugguacaacaaccucaugga

SEQ ID NO: 66557 - RNA, 23 nt, Artificial Sequence
  Chemically synthesized
ugggugguacaacaaccucaugg

SEQ ID NO: 66558 - RNA, 23 nt, Artificial Sequence
  Chemically synthesized
augggugguacaacaaccucaug

SEQ ID NO: 66559 - RNA, 23 nt, Artificial Sequence
  Chemically synthesized
gaugggugguacaacaaccucau

SEQ ID NO: 66560 - RNA, 23 nt, Artificial Sequence
  Chemically synthesized
uucucccaccauuaugagaacuu

SEQ ID NO: 66561 - RNA, 23 nt, Artificial Sequence
  Chemically synthesized
aaguuugaggugucaguguuagu

SEQ ID NO: 66562 - RNA, 23 nt, Artificial Sequence
  Chemically synthesized
uaaguuugaggugucaguguuag

SEQ ID NO: 66563 - RNA, 23 nt, Artificial Sequence
  Chemically synthesized
auaaguuugaggugucaguguua

SEQ ID NO: 66564 - RNA, 23 nt, Artificial Sequence
  Chemically synthesized
cauaaguuugaggugucaguguu

SEQ ID NO: 66565 - RNA, 23 nt, Artificial Sequence
  Chemically synthesized
ugauggaccauuuggagagggcc

SEQ ID NO: 66566 - RNA, 23 nt, Artificial Sequence
  Chemically synthesized
uugauggaccauuuggagagggc

SEQ ID NO: 66567 - RNA, 23 nt, Artificial Sequence
  Chemically synthesized
cuugauggaccauuuggagaggg

SEQ ID NO: 66568 - RNA, 23 nt, Artificial Sequence
  Chemically synthesized
ccuugauggaccauuuggagagg

SEQ ID NO: 66569 - RNA, 23 nt, Artificial Sequence
  Chemically synthesized
accuugauggaccauuuggagag

SEQ ID NO: 66570 - RNA, 23 nt, Artificial Sequence
  Chemically synthesized
gcacagcagccagcaucucuuuc

SEQ ID NO: 66571 - RNA, 23 nt, Artificial Sequence
  Chemically synthesized
ggcacagcagccagcaucucuuu

SEQ ID NO: 66572 - RNA, 23 nt, Artificial Sequence
  Chemically synthesized
gggcacagcagccagcaucucuu

SEQ ID NO: 66573 - RNA, 23 nt, Artificial Sequence
  Chemically synthesized
ucaucgagaucuccaacaacugc

SEQ ID NO: 66574 - RNA, 23 nt, Artificial Sequence
  Chemically synthesized
uucaucgagaucuccaacaacug

SEQ ID NO: 66575 - RNA, 23 nt, Artificial Sequence
  Chemically synthesized
cuucaucgagaucuccaacaacu

SEQ ID NO: 66576 - RNA, 23 nt, Artificial Sequence
  Chemically synthesized
acauccugguggucuucaugaaa

SEQ ID NO: 66577 - RNA, 23 nt, Artificial Sequence
  Chemically synthesized
cuccacagaaggucaacuucguc

SEQ ID NO: 66578 - RNA, 23 nt, Artificial Sequence
  Chemically synthesized
ccuccacagaaggucaacuucgu

SEQ ID NO: 66579 - RNA, 23 nt, Artificial Sequence
  Chemically synthesized
gccuccacagaaggucaacuucg

SEQ ID NO: 66580 - RNA, 23 nt, Artificial Sequence
  Chemically synthesized
agccuccacagaaggucaacuuc

SEQ ID NO: 66581 - RNA, 23 nt, Artificial Sequence
  Chemically synthesized
cagccuccacagaaggucaacuu

SEQ ID NO: 66582 - RNA, 23 nt, Artificial Sequence
  Chemically synthesized
uggaauggcaaggccacaaggag

SEQ ID NO: 66583 - RNA, 23 nt, Artificial Sequence
  Chemically synthesized
uuggaauggcaaggccacaagga

SEQ ID NO: 66584 - RNA, 23 nt, Artificial Sequence
  Chemically synthesized
uuuggaauggcaaggccacaagg

SEQ ID NO: 66585 - RNA, 23 nt, Artificial Sequence
  Chemically synthesized
cuuuggaauggcaaggccacaag

SEQ ID NO: 66586 - RNA, 23 nt, Artificial Sequence
  Chemically synthesized
gcuuuggaauggcaaggccacaa

SEQ ID NO: 66587 - RNA, 23 nt, Artificial Sequence
  Chemically synthesized
ggucgcuguuaucaacauugacc

SEQ ID NO: 66588 - RNA, 23 nt, Artificial Sequence
  Chemically synthesized
uggucgcuguuaucaacauugac

SEQ ID NO: 66589 - RNA, 23 nt, Artificial Sequence
  Chemically synthesized
cuggucgcuguuaucaacauuga

SEQ ID NO: 66590 - RNA, 23 nt, Artificial Sequence
  Chemically synthesized
gcuggucgcuguuaucaacauug

SEQ ID NO: 66591 - RNA, 23 nt, Artificial Sequence
  Chemically synthesized
ugcuggucgcuguuaucaacauu

SEQ ID NO: 66592 - RNA, 23 nt, Artificial Sequence
  Chemically synthesized
aaggagauugaagaaauccgaaa

SEQ ID NO: 66593 - RNA, 23 nt, Artificial Sequence
  Chemically synthesized
gaaggagauugaagaaauccgaa

SEQ ID NO: 66594 - RNA, 23 nt, Artificial Sequence
  Chemically synthesized
guucagcaccaucguccuugaac

SEQ ID NO: 66595 - RNA, 23 nt, Artificial Sequence
  Chemically synthesized
uguucagcaccaucguccuugaa

SEQ ID NO: 66596 - RNA, 23 nt, Artificial Sequence
  Chemically synthesized
cuguucagcaccaucguccuuga

SEQ ID NO: 66597 - RNA, 23 nt, Artificial Sequence
  Chemically synthesized
cgagaggaccauguguugguuga

SEQ ID NO: 66598 - RNA, 23 nt, Artificial Sequence
  Chemically synthesized
ccagcaucuccucagaguucgug

SEQ ID NO: 66599 - RNA, 23 nt, Artificial Sequence
  Chemically synthesized
cccagcaucuccucagaguucgu

SEQ ID NO: 66600 - RNA, 23 nt, Artificial Sequence
  Chemically synthesized
ccccagcaucuccucagaguucg

SEQ ID NO: 66601 - RNA, 23 nt, Artificial Sequence
  Chemically synthesized
accccagcaucuccucagaguuc

SEQ ID NO: 66602 - RNA, 23 nt, Artificial Sequence
  Chemically synthesized
gaccccagcaucuccucagaguu

SEQ ID NO: 66603 - RNA, 23 nt, Artificial Sequence
  Chemically synthesized
ccuggcccaauaccuauguaugc

SEQ ID NO: 66604 - RNA, 23 nt, Artificial Sequence
  Chemically synthesized
cccuggcccaauaccuauguaug

SEQ ID NO: 66605 - RNA, 23 nt, Artificial Sequence
  Chemically synthesized
acccuggcccaauaccuauguau

SEQ ID NO: 66606 - RNA, 23 nt, Artificial Sequence
  Chemically synthesized
gacccuggcccaauaccuaugua

SEQ ID NO: 66607 - RNA, 23 nt, Artificial Sequence
  Chemically synthesized
gaccuuagcaacaccaucucaag

SEQ ID NO: 66608 - RNA, 23 nt, Artificial Sequence
  Chemically synthesized
agaccuuagcaacaccaucucaa

SEQ ID NO: 66609 - RNA, 23 nt, Artificial Sequence
  Chemically synthesized
gagaccuuagcaacaccaucuca

SEQ ID NO: 66610 - RNA, 23 nt, Artificial Sequence
  Chemically synthesized
cccauggcaagccauuuacagaa

SEQ ID NO: 66611 - RNA, 23 nt, Artificial Sequence
  Chemically synthesized
ugugugugcaugucuguaugugu

SEQ ID NO: 66612 - RNA, 23 nt, Artificial Sequence
  Chemically synthesized
augugugugcaugucuguaugug

SEQ ID NO: 66613 - RNA, 23 nt, Artificial Sequence
  Chemically synthesized
ccacuaugcuguacaucugugag

SEQ ID NO: 66614 - RNA, 23 nt, Artificial Sequence
  Chemically synthesized
accacuaugcuguacaucuguga

SEQ ID NO: 66615 - RNA, 23 nt, Artificial Sequence
  Chemically synthesized
gaccacuaugcuguacaucugug

SEQ ID NO: 66616 - RNA, 23 nt, Artificial Sequence
  Chemically synthesized
cccguuuccacaucuucuuccug

SEQ ID NO: 66617 - RNA, 23 nt, Artificial Sequence
  Chemically synthesized
ccccguuuccacaucuucuuccu

SEQ ID NO: 66618 - RNA, 23 nt, Artificial Sequence
  Chemically synthesized
gccccguuuccacaucuucuucc

SEQ ID NO: 66619 - RNA, 23 nt, Artificial Sequence
  Chemically synthesized
ugccccguuuccacaucuucuuc

SEQ ID NO: 66620 - RNA, 23 nt, Artificial Sequence
  Chemically synthesized
cugccccguuuccacaucuucuu

SEQ ID NO: 66621 - RNA, 23 nt, Artificial Sequence
  Chemically synthesized
gcgagaaaccuuccucaaccgcu

SEQ ID NO: 66622 - RNA, 23 nt, Artificial Sequence
  Chemically synthesized
ugcgagaaaccuuccucaaccgc

SEQ ID NO: 66623 - RNA, 23 nt, Artificial Sequence
  Chemically synthesized
cugcgagaaaccuuccucaaccg

SEQ ID NO: 66624 - RNA, 23 nt, Artificial Sequence
  Chemically synthesized
ccugcgagaaaccuuccucaacc

SEQ ID NO: 66625 - RNA, 23 nt, Artificial Sequence
  Chemically synthesized
uccugcgagaaaccuuccucaac

SEQ ID NO: 66626 - RNA, 23 nt, Artificial Sequence
  Chemically synthesized
ggaagauuuucacuucaugcugc

SEQ ID NO: 66627 - RNA, 23 nt, Artificial Sequence
  Chemically synthesized
ccaacaacugccuguccaaggcc

SEQ ID NO: 66628 - RNA, 23 nt, Artificial Sequence
  Chemically synthesized
uccaacaacugccuguccaaggc

SEQ ID NO: 66629 - RNA, 23 nt, Artificial Sequence
  Chemically synthesized
cuccaacaacugccuguccaagg

SEQ ID NO: 66630 - RNA, 23 nt, Artificial Sequence
  Chemically synthesized
ucuccaacaacugccuguccaag

SEQ ID NO: 66631 - RNA, 23 nt, Artificial Sequence
  Chemically synthesized
aucuccaacaacugccuguccaa

SEQ ID NO: 66632 - RNA, 23 nt, Artificial Sequence
  Chemically synthesized
ccaaggaugaguucaucaggaug

SEQ ID NO: 66633 - RNA, 23 nt, Artificial Sequence
  Chemically synthesized
uccaaggaugaguucaucaggau

SEQ ID NO: 66634 - RNA, 23 nt, Artificial Sequence
  Chemically synthesized
uuccaaggaugaguucaucagga

SEQ ID NO: 66635 - RNA, 23 nt, Artificial Sequence
  Chemically synthesized
uuuccaaggaugaguucaucagg

SEQ ID NO: 66636 - RNA, 23 nt, Artificial Sequence
  Chemically synthesized
auuuccaaggaugaguucaucag

SEQ ID NO: 66637 - RNA, 23 nt, Artificial Sequence
  Chemically synthesized
acgugcuggucgcuguuaucaac

SEQ ID NO: 66638 - RNA, 23 nt, Artificial Sequence
  Chemically synthesized
gacgugcuggucgcuguuaucaa

SEQ ID NO: 66639 - RNA, 23 nt, Artificial Sequence
  Chemically synthesized
ggacgugcuggucgcuguuauca

SEQ ID NO: 66640 - RNA, 23 nt, Artificial Sequence
  Chemically synthesized
aggacgugcuggucgcuguuauc

SEQ ID NO: 66641 - RNA, 23 nt, Artificial Sequence
  Chemically synthesized
caggacgugcuggucgcuguuau

SEQ ID NO: 66642 - RNA, 23 nt, Artificial Sequence
  Chemically synthesized
cuuagcaacaccaucucaagggg

SEQ ID NO: 66643 - RNA, 23 nt, Artificial Sequence
  Chemically synthesized
ccuuagcaacaccaucucaaggg

SEQ ID NO: 66644 - RNA, 23 nt, Artificial Sequence
  Chemically synthesized
accuuagcaacaccaucucaagg

SEQ ID NO: 66645 - RNA, 23 nt, Artificial Sequence
  Chemically synthesized
uaugugugugcaugucuguaugu

SEQ ID NO: 66646 - RNA, 23 nt, Artificial Sequence
  Chemically synthesized
guucuguaagaagaucuacuuca

SEQ ID NO: 66647 - RNA, 23 nt, Artificial Sequence
  Chemically synthesized
ccaccaggaguggcauaaguuug

SEQ ID NO: 66648 - RNA, 23 nt, Artificial Sequence
  Chemically synthesized
gccaccaggaguggcauaaguuu

SEQ ID NO: 66649 - RNA, 23 nt, Artificial Sequence
  Chemically synthesized
gagccggaagaagguggagauca

SEQ ID NO: 66650 - RNA, 23 nt, Artificial Sequence
  Chemically synthesized
ggucuccauuuugggacauucua

SEQ ID NO: 66651 - RNA, 23 nt, Artificial Sequence
  Chemically synthesized
gggucuccauuuugggacauucu

SEQ ID NO: 66652 - RNA, 23 nt, Artificial Sequence
  Chemically synthesized
agggucuccauuuugggacauuc

SEQ ID NO: 66653 - RNA, 23 nt, Artificial Sequence
  Chemically synthesized
aagggucuccauuuugggacauu

SEQ ID NO: 66654 - RNA, 23 nt, Artificial Sequence
  Chemically synthesized
agccaggauaugaucugucccuc

SEQ ID NO: 66655 - RNA, 23 nt, Artificial Sequence
  Chemically synthesized
cagccaggauaugaucugucccu

SEQ ID NO: 66656 - RNA, 23 nt, Artificial Sequence
  Chemically synthesized
ucagccaggauaugaucuguccc

SEQ ID NO: 66657 - RNA, 23 nt, Artificial Sequence
  Chemically synthesized
aucagccaggauaugaucugucc

SEQ ID NO: 66658 - RNA, 23 nt, Artificial Sequence
  Chemically synthesized
ggaugcugagauccuucaucgag

SEQ ID NO: 66659 - RNA, 23 nt, Artificial Sequence
  Chemically synthesized
aggaugcugagauccuucaucga

SEQ ID NO: 66660 - RNA, 23 nt, Artificial Sequence
  Chemically synthesized
caggaugcugagauccuucaucg

SEQ ID NO: 66661 - RNA, 23 nt, Artificial Sequence
  Chemically synthesized
ucaggaugcugagauccuucauc

SEQ ID NO: 66662 - RNA, 23 nt, Artificial Sequence
  Chemically synthesized
aucaggaugcugagauccuucau

SEQ ID NO: 66663 - RNA, 23 nt, Artificial Sequence
  Chemically synthesized
gggaauggccucauuuccaagga

SEQ ID NO: 66664 - RNA, 23 nt, Artificial Sequence
  Chemically synthesized
ugggaauggccucauuuccaagg

SEQ ID NO: 66665 - RNA, 23 nt, Artificial Sequence
  Chemically synthesized
augggaauggccucauuuccaag

SEQ ID NO: 66666 - RNA, 23 nt, Artificial Sequence
  Chemically synthesized
gaugggaauggccucauuuccaa

SEQ ID NO: 66667 - RNA, 23 nt, Artificial Sequence
  Chemically synthesized
ccaggacuuauccuggcuagagc

SEQ ID NO: 66668 - RNA, 23 nt, Artificial Sequence
  Chemically synthesized
accaggacuuauccuggcuagag

SEQ ID NO: 66669 - RNA, 23 nt, Artificial Sequence
  Chemically synthesized
aaccaggacuuauccuggcuaga

SEQ ID NO: 66670 - RNA, 23 nt, Artificial Sequence
  Chemically synthesized
caaccaggacuuauccuggcuag

SEQ ID NO: 66671 - RNA, 23 nt, Artificial Sequence
  Chemically synthesized
acaaccaggacuuauccuggcua

SEQ ID NO: 66672 - RNA, 23 nt, Artificial Sequence
  Chemically synthesized
ggaacucaagugucuccagagcu

SEQ ID NO: 66673 - RNA, 23 nt, Artificial Sequence
  Chemically synthesized
cggaacucaagugucuccagagc

SEQ ID NO: 66674 - RNA, 23 nt, Artificial Sequence
  Chemically synthesized
ucggaacucaagugucuccagag

SEQ ID NO: 66675 - RNA, 23 nt, Artificial Sequence
  Chemically synthesized
aucggaacucaagugucuccaga

SEQ ID NO: 66676 - RNA, 23 nt, Artificial Sequence
  Chemically synthesized
ucaaucggaacucaagugucucc

SEQ ID NO: 66677 - RNA, 23 nt, Artificial Sequence
  Chemically synthesized
aucaaucggaacucaagugucuc

SEQ ID NO: 66678 - RNA, 23 nt, Artificial Sequence
  Chemically synthesized
caucaaucggaacucaagugucu

SEQ ID NO: 66679 - RNA, 23 nt, Artificial Sequence
  Chemically synthesized
ucaucaaucggaacucaaguguc

SEQ ID NO: 66680 - RNA, 23 nt, Artificial Sequence
  Chemically synthesized
caguagucucccuuccaaauaaa

SEQ ID NO: 66681 - RNA, 23 nt, Artificial Sequence
  Chemically synthesized
uuuaagcacguucuuucaucaga

SEQ ID NO: 66682 - RNA, 23 nt, Artificial Sequence
  Chemically synthesized
cauggaugcuggcaucuuagaac

SEQ ID NO: 66683 - RNA, 23 nt, Artificial Sequence
  Chemically synthesized
guacaacaaccucauggagcaca

SEQ ID NO: 66684 - RNA, 23 nt, Artificial Sequence
  Chemically synthesized
gguacaacaaccucauggagcac

SEQ ID NO: 66685 - RNA, 23 nt, Artificial Sequence
  Chemically synthesized
ugguacaacaaccucauggagca

SEQ ID NO: 66686 - RNA, 23 nt, Artificial Sequence
  Chemically synthesized
ucagaaacaaaucucagaagaca

SEQ ID NO: 66687 - RNA, 23 nt, Artificial Sequence
  Chemically synthesized
uucagaaacaaaucucagaagac

SEQ ID NO: 66688 - RNA, 23 nt, Artificial Sequence
  Chemically synthesized
cuucagaaacaaaucucagaaga

SEQ ID NO: 66689 - RNA, 23 nt, Artificial Sequence
  Chemically synthesized
acuucagaaacaaaucucagaag

SEQ ID NO: 66690 - RNA, 23 nt, Artificial Sequence
  Chemically synthesized
gacuucagaaacaaaucucagaa

SEQ ID NO: 66691 - RNA, 23 nt, Artificial Sequence
  Chemically synthesized
ugaugggugguacaacaaccuca

SEQ ID NO: 66692 - RNA, 23 nt, Artificial Sequence
  Chemically synthesized
acaucugugagcggcacuuccag

SEQ ID NO: 66693 - RNA, 23 nt, Artificial Sequence
  Chemically synthesized
uacaucugugagcggcacuucca

SEQ ID NO: 66694 - RNA, 23 nt, Artificial Sequence
  Chemically synthesized
guacaucugugagcggcacuucc

SEQ ID NO: 66695 - RNA, 23 nt, Artificial Sequence
  Chemically synthesized
uguacaucugugagcggcacuuc

SEQ ID NO: 66696 - RNA, 23 nt, Artificial Sequence
  Chemically synthesized
cuguacaucugugagcggcacuu

SEQ ID NO: 66697 - RNA, 23 nt, Artificial Sequence
  Chemically synthesized
uuccugcgagaaaccuuccucaa

SEQ ID NO: 66698 - RNA, 23 nt, Artificial Sequence
  Chemically synthesized
ucaucaccuuccugcgagaaacc

SEQ ID NO: 66699 - RNA, 23 nt, Artificial Sequence
  Chemically synthesized
cucaucaccuuccugcgagaaac

SEQ ID NO: 66700 - RNA, 23 nt, Artificial Sequence
  Chemically synthesized
ccucaucaccuuccugcgagaaa

SEQ ID NO: 66701 - RNA, 23 nt, Artificial Sequence
  Chemically synthesized
accucaucaccuuccugcgagaa

SEQ ID NO: 66702 - RNA, 23 nt, Artificial Sequence
  Chemically synthesized
aaccucaucaccuuccugcgaga

SEQ ID NO: 66703 - RNA, 23 nt, Artificial Sequence
  Chemically synthesized
ucauguucuccuacaucuugcuc

SEQ ID NO: 66704 - RNA, 23 nt, Artificial Sequence
  Chemically synthesized
uucauguucuccuacaucuugcu

SEQ ID NO: 66705 - RNA, 23 nt, Artificial Sequence
  Chemically synthesized
uuucauguucuccuacaucuugc

SEQ ID NO: 66706 - RNA, 23 nt, Artificial Sequence
  Chemically synthesized
cuuucauguucuccuacaucuug

SEQ ID NO: 66707 - RNA, 23 nt, Artificial Sequence
  Chemically synthesized
gaagggucuccauuuugggacau

SEQ ID NO: 66708 - RNA, 23 nt, Artificial Sequence
  Chemically synthesized
agcgcuucauugagaacuaccgg

SEQ ID NO: 66709 - RNA, 23 nt, Artificial Sequence
  Chemically synthesized
aagcgcuucauugagaacuaccg

SEQ ID NO: 66710 - RNA, 23 nt, Artificial Sequence
  Chemically synthesized
caagcgcuucauugagaacuacc

SEQ ID NO: 66711 - RNA, 23 nt, Artificial Sequence
  Chemically synthesized
caaggaguaugaccuggugcugc

SEQ ID NO: 66712 - RNA, 23 nt, Artificial Sequence
  Chemically synthesized
ccaaggaguaugaccuggugcug

SEQ ID NO: 66713 - RNA, 23 nt, Artificial Sequence
  Chemically synthesized
cccaaggaguaugaccuggugcu

SEQ ID NO: 66714 - RNA, 23 nt, Artificial Sequence
  Chemically synthesized
ccccaaggaguaugaccuggugc

SEQ ID NO: 66715 - RNA, 23 nt, Artificial Sequence
  Chemically synthesized
uccccaaggaguaugaccuggug

SEQ ID NO: 66716 - RNA, 23 nt, Artificial Sequence
  Chemically synthesized
cacagaaggucaacuucguccug

SEQ ID NO: 66717 - RNA, 23 nt, Artificial Sequence
  Chemically synthesized
ccacagaaggucaacuucguccu

SEQ ID NO: 66718 - RNA, 23 nt, Artificial Sequence
  Chemically synthesized
uccacagaaggucaacuucgucc

SEQ ID NO: 66719 - RNA, 23 nt, Artificial Sequence
  Chemically synthesized
aggcauggaagcuuuggaauggc

SEQ ID NO: 66720 - RNA, 23 nt, Artificial Sequence
  Chemically synthesized
gaggcauggaagcuuuggaaugg

SEQ ID NO: 66721 - RNA, 23 nt, Artificial Sequence
  Chemically synthesized
ggaggcauggaagcuuuggaaug

SEQ ID NO: 66722 - RNA, 23 nt, Artificial Sequence
  Chemically synthesized
gggaggcauggaagcuuuggaau

SEQ ID NO: 66723 - RNA, 23 nt, Artificial Sequence
  Chemically synthesized
ugggaggcauggaagcuuuggaa

SEQ ID NO: 66724 - RNA, 23 nt, Artificial Sequence
  Chemically synthesized
gguuugagaacaccaggaauggg

SEQ ID NO: 66725 - RNA, 23 nt, Artificial Sequence
  Chemically synthesized
ugguuugagaacaccaggaaugg

SEQ ID NO: 66726 - RNA, 23 nt, Artificial Sequence
  Chemically synthesized
cugguuugagaacaccaggaaug

SEQ ID NO: 66727 - RNA, 23 nt, Artificial Sequence
  Chemically synthesized
acugguuugagaacaccaggaau

SEQ ID NO: 66728 - RNA, 23 nt, Artificial Sequence
  Chemically synthesized
uacugguuugagaacaccaggaa

SEQ ID NO: 66729 - RNA, 23 nt, Artificial Sequence
  Chemically synthesized
ugaccgcuacugguuugagaaca

SEQ ID NO: 66730 - RNA, 23 nt, Artificial Sequence
  Chemically synthesized
ccuguacaaccaggacuuauccu

SEQ ID NO: 66731 - RNA, 23 nt, Artificial Sequence
  Chemically synthesized
cugggcuugucucccauuacccg

SEQ ID NO: 66732 - RNA, 23 nt, Artificial Sequence
  Chemically synthesized
acugggcuugucucccauuaccc

SEQ ID NO: 66733 - RNA, 23 nt, Artificial Sequence
  Chemically synthesized
cacugggcuugucucccauuacc

SEQ ID NO: 66734 - RNA, 23 nt, Artificial Sequence
  Chemically synthesized
gcacugggcuugucucccauuac

SEQ ID NO: 66735 - RNA, 23 nt, Artificial Sequence
  Chemically synthesized
agcacugggcuugucucccauua

SEQ ID NO: 66736 - RNA, 23 nt, Artificial Sequence
  Chemically synthesized
gcgagaggaccauguguugguug

SEQ ID NO: 66737 - RNA, 23 nt, Artificial Sequence
  Chemically synthesized
ugcugaagauguggaugcacugc

SEQ ID NO: 66738 - RNA, 23 nt, Artificial Sequence
  Chemically synthesized
gugcugaagauguggaugcacug

SEQ ID NO: 66739 - RNA, 23 nt, Artificial Sequence
  Chemically synthesized
agugcugaagauguggaugcacu

SEQ ID NO: 66740 - RNA, 23 nt, Artificial Sequence
  Chemically synthesized
aagugcugaagauguggaugcac

SEQ ID NO: 66741 - RNA, 23 nt, Artificial Sequence
  Chemically synthesized
aaagugcugaagauguggaugca

SEQ ID NO: 66742 - RNA, 23 nt, Artificial Sequence
  Chemically synthesized
agaaaacacucccggaguauaca

SEQ ID NO: 66743 - RNA, 23 nt, Artificial Sequence
  Chemically synthesized
cagaaaacacucccggaguauac

SEQ ID NO: 66744 - RNA, 23 nt, Artificial Sequence
  Chemically synthesized
gcagaaaacacucccggaguaua

SEQ ID NO: 66745 - RNA, 23 nt, Artificial Sequence
  Chemically synthesized
ugcagaaaacacucccggaguau

SEQ ID NO: 66746 - RNA, 23 nt, Artificial Sequence
  Chemically synthesized
cugcagaaaacacucccggagua

SEQ ID NO: 66747 - RNA, 23 nt, Artificial Sequence
  Chemically synthesized
agacccuggcccaauaccuaugu

SEQ ID NO: 66748 - RNA, 23 nt, Artificial Sequence
  Chemically synthesized
agacuucagaaacaaaucucaga

SEQ ID NO: 66749 - RNA, 23 nt, Artificial Sequence
  Chemically synthesized
cagacuucagaaacaaaucucag

SEQ ID NO: 66750 - RNA, 23 nt, Artificial Sequence
  Chemically synthesized
ccauagucagucaccaugugugg

SEQ ID NO: 66751 - RNA, 23 nt, Artificial Sequence
  Chemically synthesized
gccauagucagucaccaugugug

SEQ ID NO: 66752 - RNA, 23 nt, Artificial Sequence
  Chemically synthesized
ggccauagucagucaccaugugu

SEQ ID NO: 66753 - RNA, 23 nt, Artificial Sequence
  Chemically synthesized
uggccauagucagucaccaugug

SEQ ID NO: 66754 - RNA, 23 nt, Artificial Sequence
  Chemically synthesized
guggccauagucagucaccaugu

SEQ ID NO: 66755 - RNA, 23 nt, Artificial Sequence
  Chemically synthesized
gguggccauagucagucaccaug

SEQ ID NO: 66756 - RNA, 23 nt, Artificial Sequence
  Chemically synthesized
cccuuugagcccuucuucaacuc

SEQ ID NO: 66757 - RNA, 23 nt, Artificial Sequence
  Chemically synthesized
ccccuuugagcccuucuucaacu

SEQ ID NO: 66758 - RNA, 23 nt, Artificial Sequence
  Chemically synthesized
cccccuuugagcccuucuucaac

SEQ ID NO: 66759 - RNA, 23 nt, Artificial Sequence
  Chemically synthesized
ccccccuuugagcccuucuucaa

SEQ ID NO: 66760 - RNA, 23 nt, Artificial Sequence
  Chemically synthesized
uccccccuuugagcccuucuuca

SEQ ID NO: 66761 - RNA, 23 nt, Artificial Sequence
  Chemically synthesized
cuaugcuguacaucugugagcgg

SEQ ID NO: 66762 - RNA, 23 nt, Artificial Sequence
  Chemically synthesized
acuaugcuguacaucugugagcg

SEQ ID NO: 66763 - RNA, 23 nt, Artificial Sequence
  Chemically synthesized
cacuaugcuguacaucugugagc

SEQ ID NO: 66764 - RNA, 23 nt, Artificial Sequence
  Chemically synthesized
gagagguggaggagaaugaccac

SEQ ID NO: 66765 - RNA, 23 nt, Artificial Sequence
  Chemically synthesized
cgagagguggaggagaaugacca

SEQ ID NO: 66766 - RNA, 23 nt, Artificial Sequence
  Chemically synthesized
ccgagagguggaggagaaugacc

SEQ ID NO: 66767 - RNA, 23 nt, Artificial Sequence
  Chemically synthesized
uccgagagguggaggagaaugac

SEQ ID NO: 66768 - RNA, 23 nt, Artificial Sequence
  Chemically synthesized
auccgagagguggaggagaauga

SEQ ID NO: 66769 - RNA, 23 nt, Artificial Sequence
  Chemically synthesized
cgucagcugccaaguguucugua

SEQ ID NO: 66770 - RNA, 23 nt, Artificial Sequence
  Chemically synthesized
cccccagaaguauuacugguggu

SEQ ID NO: 66771 - RNA, 23 nt, Artificial Sequence
  Chemically synthesized
ucccccagaaguauuacuggugg

SEQ ID NO: 66772 - RNA, 23 nt, Artificial Sequence
  Chemically synthesized
cucccccagaaguauuacuggug

SEQ ID NO: 66773 - RNA, 23 nt, Artificial Sequence
  Chemically synthesized
ggacauucuaaucccugagcccc

SEQ ID NO: 66774 - RNA, 23 nt, Artificial Sequence
  Chemically synthesized
gggacauucuaaucccugagccc

SEQ ID NO: 66775 - RNA, 23 nt, Artificial Sequence
  Chemically synthesized
ugggacauucuaaucccugagcc

SEQ ID NO: 66776 - RNA, 23 nt, Artificial Sequence
  Chemically synthesized
uugggacauucuaaucccugagc

SEQ ID NO: 66777 - RNA, 23 nt, Artificial Sequence
  Chemically synthesized
uuugggacauucuaaucccugag

SEQ ID NO: 66778 - RNA, 23 nt, Artificial Sequence
  Chemically synthesized
gugggccauguggugaaugugua

SEQ ID NO: 66779 - RNA, 23 nt, Artificial Sequence
  Chemically synthesized
gccuacuacuacgccuuugccgc

SEQ ID NO: 66780 - RNA, 23 nt, Artificial Sequence
  Chemically synthesized
ggccuacuacuacgccuuugccg

SEQ ID NO: 66781 - RNA, 23 nt, Artificial Sequence
  Chemically synthesized
gggccuacuacuacgccuuugcc

SEQ ID NO: 66782 - RNA, 23 nt, Artificial Sequence
  Chemically synthesized
agggccuacuacuacgccuuugc

SEQ ID NO: 66783 - RNA, 23 nt, Artificial Sequence
  Chemically synthesized
gagggccuacuacuacgccuuug

SEQ ID NO: 66784 - RNA, 23 nt, Artificial Sequence
  Chemically synthesized
agagggccuacuacuacgccuuu

SEQ ID NO: 66785 - RNA, 23 nt, Artificial Sequence
  Chemically synthesized
caucagccaggauaugaucuguc

SEQ ID NO: 66786 - RNA, 23 nt, Artificial Sequence
  Chemically synthesized
ugccugaagucaucaaggaccuc

SEQ ID NO: 66787 - RNA, 23 nt, Artificial Sequence
  Chemically synthesized
gugccugaagucaucaaggaccu

SEQ ID NO: 66788 - RNA, 23 nt, Artificial Sequence
  Chemically synthesized
ggugccugaagucaucaaggacc

SEQ ID NO: 66789 - RNA, 23 nt, Artificial Sequence
  Chemically synthesized
aggugccugaagucaucaaggac

SEQ ID NO: 66790 - RNA, 23 nt, Artificial Sequence
  Chemically synthesized
gaggugccugaagucaucaagga

SEQ ID NO: 66791 - RNA, 23 nt, Artificial Sequence
  Chemically synthesized
gucucgccuuauguuccgcaugu

SEQ ID NO: 66792 - RNA, 23 nt, Artificial Sequence
  Chemically synthesized
uccugaggaaaagucucgccuua

SEQ ID NO: 66793 - RNA, 23 nt, Artificial Sequence
  Chemically synthesized
auccccaaggaguaugaccuggu

SEQ ID NO: 66794 - RNA, 23 nt, Artificial Sequence
  Chemically synthesized
gcagccuccacagaaggucaacu

SEQ ID NO: 66795 - RNA, 23 nt, Artificial Sequence
  Chemically synthesized
ugcagccuccacagaaggucaac

SEQ ID NO: 66796 - RNA, 23 nt, Artificial Sequence
  Chemically synthesized
cugcagccuccacagaaggucaa

SEQ ID NO: 66797 - RNA, 23 nt, Artificial Sequence
  Chemically synthesized
gccugcucagugccuggauuguu

SEQ ID NO: 66798 - RNA, 23 nt, Artificial Sequence
  Chemically synthesized
gucgcuguuaucaacauugaccc

SEQ ID NO: 66799 - RNA, 23 nt, Artificial Sequence
  Chemically synthesized
gagcacccaagccuacaaagugc

SEQ ID NO: 66800 - RNA, 23 nt, Artificial Sequence
  Chemically synthesized
aaucggaacucaagugucuccag

SEQ ID NO: 66801 - RNA, 23 nt, Artificial Sequence
  Chemically synthesized
caaucggaacucaagugucucca

SEQ ID NO: 66802 - RNA, 23 nt, Artificial Sequence
  Chemically synthesized
uaccagaacaucgcuguguauga

SEQ ID NO: 66803 - RNA, 23 nt, Artificial Sequence
  Chemically synthesized
cuaccagaacaucgcuguguaug

SEQ ID NO: 66804 - RNA, 23 nt, Artificial Sequence
  Chemically synthesized
ccuaccagaacaucgcuguguau

SEQ ID NO: 66805 - RNA, 23 nt, Artificial Sequence
  Chemically synthesized
accuaccagaacaucgcugugua

SEQ ID NO: 66806 - RNA, 23 nt, Artificial Sequence
  Chemically synthesized
cguucuuucaucagacccuggcc

SEQ ID NO: 66807 - RNA, 23 nt, Artificial Sequence
  Chemically synthesized
acguucuuucaucagacccuggc

SEQ ID NO: 66808 - RNA, 23 nt, Artificial Sequence
  Chemically synthesized
cacguucuuucaucagacccugg

SEQ ID NO: 66809 - RNA, 23 nt, Artificial Sequence
  Chemically synthesized
caucuuagaacccucccuacucc

SEQ ID NO: 66810 - RNA, 23 nt, Artificial Sequence
  Chemically synthesized
agaaacaaaucucagaagacaag

SEQ ID NO: 66811 - RNA, 23 nt, Artificial Sequence
  Chemically synthesized
cagaaacaaaucucagaagacaa

SEQ ID NO: 66812 - RNA, 23 nt, Artificial Sequence
  Chemically synthesized
aggaccaggaugugucucagccu

SEQ ID NO: 66813 - RNA, 23 nt, Artificial Sequence
  Chemically synthesized
caggaccaggaugugucucagcc

SEQ ID NO: 66814 - RNA, 23 nt, Artificial Sequence
  Chemically synthesized
ccaggaccaggaugugucucagc

SEQ ID NO: 66815 - RNA, 23 nt, Artificial Sequence
  Chemically synthesized
cccaggaccaggaugugucucag

SEQ ID NO: 66816 - RNA, 23 nt, Artificial Sequence
  Chemically synthesized
ccccaggaccaggaugugucuca

SEQ ID NO: 66817 - RNA, 23 nt, Artificial Sequence
  Chemically synthesized
uccuauuucuggcugccucagcc

SEQ ID NO: 66818 - RNA, 23 nt, Artificial Sequence
  Chemically synthesized
uuccuauuucuggcugccucagc

SEQ ID NO: 66819 - RNA, 23 nt, Artificial Sequence
  Chemically synthesized
cuuccuauuucuggcugccucag

SEQ ID NO: 66820 - RNA, 23 nt, Artificial Sequence
  Chemically synthesized
ucuuccuauuucuggcugccuca

SEQ ID NO: 66821 - RNA, 23 nt, Artificial Sequence
  Chemically synthesized
uucuuccuauuucuggcugccuc

SEQ ID NO: 66822 - RNA, 23 nt, Artificial Sequence
  Chemically synthesized
ccugucagcucaucaacaggcag

SEQ ID NO: 66823 - RNA, 23 nt, Artificial Sequence
  Chemically synthesized
gccugucagcucaucaacaggca

SEQ ID NO: 66824 - RNA, 23 nt, Artificial Sequence
  Chemically synthesized
ggccugucagcucaucaacaggc

SEQ ID NO: 66825 - RNA, 23 nt, Artificial Sequence
  Chemically synthesized
ugaccaagaauguggaaaaggcc

SEQ ID NO: 66826 - RNA, 23 nt, Artificial Sequence
  Chemically synthesized
augaccaagaauguggaaaaggc

SEQ ID NO: 66827 - RNA, 23 nt, Artificial Sequence
  Chemically synthesized
caugaccaagaauguggaaaagg

SEQ ID NO: 66828 - RNA, 23 nt, Artificial Sequence
  Chemically synthesized
gcaugaccaagaauguggaaaag

SEQ ID NO: 66829 - RNA, 23 nt, Artificial Sequence
  Chemically synthesized
ggcaugaccaagaauguggaaaa

SEQ ID NO: 66830 - RNA, 23 nt, Artificial Sequence
  Chemically synthesized
ucaaagaccuggucuucaaguca

SEQ ID NO: 66831 - RNA, 23 nt, Artificial Sequence
  Chemically synthesized
cucaaagaccuggucuucaaguc

SEQ ID NO: 66832 - RNA, 23 nt, Artificial Sequence
  Chemically synthesized
ccucaaagaccuggucuucaagu

SEQ ID NO: 66833 - RNA, 23 nt, Artificial Sequence
  Chemically synthesized
uccucaaagaccuggucuucaag

SEQ ID NO: 66834 - RNA, 23 nt, Artificial Sequence
  Chemically synthesized
auccucaaagaccuggucuucaa

SEQ ID NO: 66835 - RNA, 23 nt, Artificial Sequence
  Chemically synthesized
gcucuagcauggacacuucuggu

SEQ ID NO: 66836 - RNA, 23 nt, Artificial Sequence
  Chemically synthesized
ggcucuagcauggacacuucugg

SEQ ID NO: 66837 - RNA, 23 nt, Artificial Sequence
  Chemically synthesized
uggcucuagcauggacacuucug

SEQ ID NO: 66838 - RNA, 23 nt, Artificial Sequence
  Chemically synthesized
cuggcucuagcauggacacuucu

SEQ ID NO: 66839 - RNA, 23 nt, Artificial Sequence
  Chemically synthesized
ccuggcucuagcauggacacuuc

SEQ ID NO: 66840 - RNA, 23 nt, Artificial Sequence
  Chemically synthesized
gccuggcucuagcauggacacuu

SEQ ID NO: 66841 - RNA, 23 nt, Artificial Sequence
  Chemically synthesized
aagcuguaccuugauggaccauu

SEQ ID NO: 66842 - RNA, 23 nt, Artificial Sequence
  Chemically synthesized
aaagcuguaccuugauggaccau

SEQ ID NO: 66843 - RNA, 23 nt, Artificial Sequence
  Chemically synthesized
caaagcuguaccuugauggacca

SEQ ID NO: 66844 - RNA, 23 nt, Artificial Sequence
  Chemically synthesized
ccaaagcuguaccuugauggacc

SEQ ID NO: 66845 - RNA, 23 nt, Artificial Sequence
  Chemically synthesized
cccaaagcuguaccuugauggac

SEQ ID NO: 66846 - RNA, 23 nt, Artificial Sequence
  Chemically synthesized
acccaaagcuguaccuugaugga

SEQ ID NO: 66847 - RNA, 23 nt, Artificial Sequence
  Chemically synthesized
uacccaaagcuguaccuugaugg

SEQ ID NO: 66848 - RNA, 23 nt, Artificial Sequence
  Chemically synthesized
auacccaaagcuguaccuugaug

SEQ ID NO: 66849 - RNA, 23 nt, Artificial Sequence
  Chemically synthesized
uuuugggacauucuaaucccuga

SEQ ID NO: 66850 - RNA, 23 nt, Artificial Sequence
  Chemically synthesized
gcgcuucauugagaacuaccggc

SEQ ID NO: 66851 - RNA, 23 nt, Artificial Sequence
  Chemically synthesized
ugaagggucuccauuuugggaca

SEQ ID NO: 66852 - RNA, 23 nt, Artificial Sequence
  Chemically synthesized
acggugcaacaguucaagcgcuu

SEQ ID NO: 66853 - RNA, 23 nt, Artificial Sequence
  Chemically synthesized
acaucagccaggauaugaucugu

SEQ ID NO: 66854 - RNA, 23 nt, Artificial Sequence
  Chemically synthesized
uacaucagccaggauaugaucug

SEQ ID NO: 66855 - RNA, 23 nt, Artificial Sequence
  Chemically synthesized
cuacaucagccaggauaugaucu

SEQ ID NO: 66856 - RNA, 23 nt, Artificial Sequence
  Chemically synthesized
ccuacaucagccaggauaugauc

SEQ ID NO: 66857 - RNA, 23 nt, Artificial Sequence
  Chemically synthesized
uccuacaucagccaggauaugau

SEQ ID NO: 66858 - RNA, 23 nt, Artificial Sequence
  Chemically synthesized
acaauagcgagcuccgcuucacg

SEQ ID NO: 66859 - RNA, 23 nt, Artificial Sequence
  Chemically synthesized
cacaauagcgagcuccgcuucac

SEQ ID NO: 66860 - RNA, 23 nt, Artificial Sequence
  Chemically synthesized
ccacaauagcgagcuccgcuuca

SEQ ID NO: 66861 - RNA, 23 nt, Artificial Sequence
  Chemically synthesized
accacaauagcgagcuccgcuuc

SEQ ID NO: 66862 - RNA, 23 nt, Artificial Sequence
  Chemically synthesized
gaccacaauagcgagcuccgcuu

SEQ ID NO: 66863 - RNA, 23 nt, Artificial Sequence
  Chemically synthesized
uguuccgcauguacgacuuugau

SEQ ID NO: 66864 - RNA, 23 nt, Artificial Sequence
  Chemically synthesized
gaaaggcucuccugaggaaaagu

SEQ ID NO: 66865 - RNA, 23 nt, Artificial Sequence
  Chemically synthesized
ugaaaggcucuccugaggaaaag

SEQ ID NO: 66866 - RNA, 23 nt, Artificial Sequence
  Chemically synthesized
augaaaggcucuccugaggaaaa

SEQ ID NO: 66867 - RNA, 23 nt, Artificial Sequence
  Chemically synthesized
caugaaaggcucuccugaggaaa

SEQ ID NO: 66868 - RNA, 23 nt, Artificial Sequence
  Chemically synthesized
ucaugaaaggcucuccugaggaa

SEQ ID NO: 66869 - RNA, 23 nt, Artificial Sequence
  Chemically synthesized
ggaaugggcuguucuccaagaag

SEQ ID NO: 66870 - RNA, 23 nt, Artificial Sequence
  Chemically synthesized
aggaaugggcuguucuccaagaa

SEQ ID NO: 66871 - RNA, 23 nt, Artificial Sequence
  Chemically synthesized
caggaaugggcuguucuccaaga

SEQ ID NO: 66872 - RNA, 23 nt, Artificial Sequence
  Chemically synthesized
ccaggaaugggcuguucuccaag

SEQ ID NO: 66873 - RNA, 23 nt, Artificial Sequence
  Chemically synthesized
accaggaaugggcuguucuccaa

SEQ ID NO: 66874 - RNA, 23 nt, Artificial Sequence
  Chemically synthesized
gcaucuccucagaguucguggcg

SEQ ID NO: 66875 - RNA, 23 nt, Artificial Sequence
  Chemically synthesized
agcaucuccucagaguucguggc

SEQ ID NO: 66876 - RNA, 23 nt, Artificial Sequence
  Chemically synthesized
cagcaucuccucagaguucgugg

SEQ ID NO: 66877 - RNA, 23 nt, Artificial Sequence
  Chemically synthesized
ggaguauacaggauaccggccau

SEQ ID NO: 66878 - RNA, 23 nt, Artificial Sequence
  Chemically synthesized
cggaguauacaggauaccggcca

SEQ ID NO: 66879 - RNA, 23 nt, Artificial Sequence
  Chemically synthesized
ccggaguauacaggauaccggcc

SEQ ID NO: 66880 - RNA, 23 nt, Artificial Sequence
  Chemically synthesized
cccggaguauacaggauaccggc

SEQ ID NO: 66881 - RNA, 23 nt, Artificial Sequence
  Chemically synthesized
ucccggaguauacaggauaccgg

SEQ ID NO: 66882 - RNA, 23 nt, Artificial Sequence
  Chemically synthesized
cucccggaguauacaggauaccg

SEQ ID NO: 66883 - RNA, 23 nt, Artificial Sequence
  Chemically synthesized
acucccggaguauacaggauacc

SEQ ID NO: 66884 - RNA, 23 nt, Artificial Sequence
  Chemically synthesized
cacucccggaguauacaggauac

SEQ ID NO: 66885 - RNA, 23 nt, Artificial Sequence
  Chemically synthesized
agcgccaucuaugguuccucgca

SEQ ID NO: 66886 - RNA, 23 nt, Artificial Sequence
  Chemically synthesized
cgccgaguuccucaacauucgca

SEQ ID NO: 66887 - RNA, 23 nt, Artificial Sequence
  Chemically synthesized
ccgccgaguuccucaacauucgc

SEQ ID NO: 66888 - RNA, 23 nt, Artificial Sequence
  Chemically synthesized
cccgccgaguuccucaacauucg

SEQ ID NO: 66889 - RNA, 23 nt, Artificial Sequence
  Chemically synthesized
ccccgccgaguuccucaacauuc

SEQ ID NO: 66890 - RNA, 23 nt, Artificial Sequence
  Chemically synthesized
gccccgccgaguuccucaacauu

SEQ ID NO: 66891 - RNA, 23 nt, Artificial Sequence
  Chemically synthesized
uuucacccaagguuuuaagcacg

SEQ ID NO: 66892 - RNA, 23 nt, Artificial Sequence
  Chemically synthesized
auuucacccaagguuuuaagcac

SEQ ID NO: 66893 - RNA, 23 nt, Artificial Sequence
  Chemically synthesized
aaccucugcuuccagacuucaga

SEQ ID NO: 66894 - RNA, 23 nt, Artificial Sequence
  Chemically synthesized
aaaccucugcuuccagacuucag

SEQ ID NO: 66895 - RNA, 23 nt, Artificial Sequence
  Chemically synthesized
gaaaccucugcuuccagacuuca

SEQ ID NO: 66896 - RNA, 23 nt, Artificial Sequence
  Chemically synthesized
ugaaaccucugcuuccagacuuc

SEQ ID NO: 66897 - RNA, 23 nt, Artificial Sequence
  Chemically synthesized
gugaaaccucugcuuccagacuu

SEQ ID NO: 66898 - RNA, 23 nt, Artificial Sequence
  Chemically synthesized
ucccaaccuuguuccagguggcc

SEQ ID NO: 66899 - RNA, 23 nt, Artificial Sequence
  Chemically synthesized
cucccaaccuuguuccagguggc

SEQ ID NO: 66900 - RNA, 23 nt, Artificial Sequence
  Chemically synthesized
ccucccaaccuuguuccaggugg

SEQ ID NO: 66901 - RNA, 23 nt, Artificial Sequence
  Chemically synthesized
accucccaaccuuguuccaggug

SEQ ID NO: 66902 - RNA, 23 nt, Artificial Sequence
  Chemically synthesized
caccucccaaccuuguuccaggu

SEQ ID NO: 66903 - RNA, 23 nt, Artificial Sequence
  Chemically synthesized
ggcacuuccagaagguucugaac

SEQ ID NO: 66904 - RNA, 23 nt, Artificial Sequence
  Chemically synthesized
cggcacuuccagaagguucugaa

SEQ ID NO: 66905 - RNA, 23 nt, Artificial Sequence
  Chemically synthesized
gcggcacuuccagaagguucuga

SEQ ID NO: 66906 - RNA, 23 nt, Artificial Sequence
  Chemically synthesized
agcggcacuuccagaagguucug

SEQ ID NO: 66907 - RNA, 23 nt, Artificial Sequence
  Chemically synthesized
gagcggcacuuccagaagguucu

SEQ ID NO: 66908 - RNA, 23 nt, Artificial Sequence
  Chemically synthesized
uggugucugugcacaucuacauc

SEQ ID NO: 66909 - RNA, 23 nt, Artificial Sequence
  Chemically synthesized
cuggugucugugcacaucuacau

SEQ ID NO: 66910 - RNA, 23 nt, Artificial Sequence
  Chemically synthesized
ccuggugucugugcacaucuaca

SEQ ID NO: 66911 - RNA, 23 nt, Artificial Sequence
  Chemically synthesized
accuggugucugugcacaucuac

SEQ ID NO: 66912 - RNA, 23 nt, Artificial Sequence
  Chemically synthesized
gaccuggugucugugcacaucua

SEQ ID NO: 66913 - RNA, 23 nt, Artificial Sequence
  Chemically synthesized
ggccaccaggaguggcauaaguu

SEQ ID NO: 66914 - RNA, 23 nt, Artificial Sequence
  Chemically synthesized
gggccaccaggaguggcauaagu

SEQ ID NO: 66915 - RNA, 23 nt, Artificial Sequence
  Chemically synthesized
gauacccaaagcuguaccuugau

SEQ ID NO: 66916 - RNA, 23 nt, Artificial Sequence
  Chemically synthesized
acacgcuuagccugcacauccgg

SEQ ID NO: 66917 - RNA, 23 nt, Artificial Sequence
  Chemically synthesized
gacacgcuuagccugcacauccg

SEQ ID NO: 66918 - RNA, 23 nt, Artificial Sequence
  Chemically synthesized
ggacacgcuuagccugcacaucc

SEQ ID NO: 66919 - RNA, 23 nt, Artificial Sequence
  Chemically synthesized
aggacacgcuuagccugcacauc

SEQ ID NO: 66920 - RNA, 23 nt, Artificial Sequence
  Chemically synthesized
gaggacacgcuuagccugcacau

SEQ ID NO: 66921 - RNA, 23 nt, Artificial Sequence
  Chemically synthesized
augguagcuuugcccugauccag

SEQ ID NO: 66922 - RNA, 23 nt, Artificial Sequence
  Chemically synthesized
caugguagcuuugcccugaucca

SEQ ID NO: 66923 - RNA, 23 nt, Artificial Sequence
  Chemically synthesized
ccaugguagcuuugcccugaucc

SEQ ID NO: 66924 - RNA, 23 nt, Artificial Sequence
  Chemically synthesized
uccaugguagcuuugcccugauc

SEQ ID NO: 66925 - RNA, 23 nt, Artificial Sequence
  Chemically synthesized
auccaugguagcuuugcccugau

SEQ ID NO: 66926 - RNA, 23 nt, Artificial Sequence
  Chemically synthesized
gccguggacuuccaucgccucau

SEQ ID NO: 66927 - RNA, 23 nt, Artificial Sequence
  Chemically synthesized
ccaccagacggugcaacaguuca

SEQ ID NO: 66928 - RNA, 23 nt, Artificial Sequence
  Chemically synthesized
uccaccagacggugcaacaguuc

SEQ ID NO: 66929 - RNA, 23 nt, Artificial Sequence
  Chemically synthesized
cuccaccagacggugcaacaguu

SEQ ID NO: 66930 - RNA, 23 nt, Artificial Sequence
  Chemically synthesized
caucaggaugcugagauccuuca

SEQ ID NO: 66931 - RNA, 23 nt, Artificial Sequence
  Chemically synthesized
ucaucaggaugcugagauccuuc

SEQ ID NO: 66932 - RNA, 23 nt, Artificial Sequence
  Chemically synthesized
uucaucaggaugcugagauccuu

SEQ ID NO: 66933 - RNA, 23 nt, Artificial Sequence
  Chemically synthesized
ggagaccuuuuucaggcaccuuu

SEQ ID NO: 66934 - RNA, 23 nt, Artificial Sequence
  Chemically synthesized
uggagaccuuuuucaggcaccuu

SEQ ID NO: 66935 - RNA, 23 nt, Artificial Sequence
  Chemically synthesized
cuggagaccuuuuucaggcaccu

SEQ ID NO: 66936 - RNA, 23 nt, Artificial Sequence
  Chemically synthesized
ccuggagaccuuuuucaggcacc

SEQ ID NO: 66937 - RNA, 23 nt, Artificial Sequence
  Chemically synthesized
uccuggagaccuuuuucaggcac

SEQ ID NO: 66938 - RNA, 23 nt, Artificial Sequence
  Chemically synthesized
gugggaggcauggaagcuuugga

SEQ ID NO: 66939 - RNA, 23 nt, Artificial Sequence
  Chemically synthesized
cgugggaggcauggaagcuuugg

SEQ ID NO: 66940 - RNA, 23 nt, Artificial Sequence
  Chemically synthesized
ucgugggaggcauggaagcuuug

SEQ ID NO: 66941 - RNA, 23 nt, Artificial Sequence
  Chemically synthesized
cucgugggaggcauggaagcuuu

SEQ ID NO: 66942 - RNA, 23 nt, Artificial Sequence
  Chemically synthesized
gugcuggucgcuguuaucaacau

SEQ ID NO: 66943 - RNA, 23 nt, Artificial Sequence
  Chemically synthesized
gugaccgcuacugguuugagaac

SEQ ID NO: 66944 - RNA, 23 nt, Artificial Sequence
  Chemically synthesized
cuguacaaccaggacuuauccug

SEQ ID NO: 66945 - RNA, 23 nt, Artificial Sequence
  Chemically synthesized
agauguggaugcacugcugcugg

SEQ ID NO: 66946 - RNA, 23 nt, Artificial Sequence
  Chemically synthesized
aagauguggaugcacugcugcug

SEQ ID NO: 66947 - RNA, 23 nt, Artificial Sequence
  Chemically synthesized
gaagauguggaugcacugcugcu

SEQ ID NO: 66948 - RNA, 23 nt, Artificial Sequence
  Chemically synthesized
ugaagauguggaugcacugcugc

SEQ ID NO: 66949 - RNA, 23 nt, Artificial Sequence
  Chemically synthesized
cugaagauguggaugcacugcug

SEQ ID NO: 66950 - RNA, 23 nt, Artificial Sequence
  Chemically synthesized
cccaagccuacaaagugcugaag

SEQ ID NO: 66951 - RNA, 23 nt, Artificial Sequence
  Chemically synthesized
acccaagccuacaaagugcugaa

SEQ ID NO: 66952 - RNA, 23 nt, Artificial Sequence
  Chemically synthesized
cacccaagccuacaaagugcuga

SEQ ID NO: 66953 - RNA, 23 nt, Artificial Sequence
  Chemically synthesized
gcacccaagccuacaaagugcug

SEQ ID NO: 66954 - RNA, 23 nt, Artificial Sequence
  Chemically synthesized
agcacccaagccuacaaagugcu

SEQ ID NO: 66955 - RNA, 23 nt, Artificial Sequence
  Chemically synthesized
ccgaguuccucaacauucgcauc

SEQ ID NO: 66956 - RNA, 23 nt, Artificial Sequence
  Chemically synthesized
gccgaguuccucaacauucgcau

SEQ ID NO: 66957 - RNA, 23 nt, Artificial Sequence
  Chemically synthesized
agauccccaaggaguaugaccug

SEQ ID NO: 66958 - RNA, 23 nt, Artificial Sequence
  Chemically synthesized
aagauccccaaggaguaugaccu

SEQ ID NO: 66959 - RNA, 23 nt, Artificial Sequence
  Chemically synthesized
caagauccccaaggaguaugacc

SEQ ID NO: 66960 - RNA, 23 nt, Artificial Sequence
  Chemically synthesized
ucaagauccccaaggaguaugac

SEQ ID NO: 66961 - RNA, 23 nt, Artificial Sequence
  Chemically synthesized
cucaagauccccaaggaguauga

SEQ ID NO: 66962 - RNA, 23 nt, Artificial Sequence
  Chemically synthesized
uugccuccauccucaaagaccug

SEQ ID NO: 66963 - RNA, 23 nt, Artificial Sequence
  Chemically synthesized
uuugccuccauccucaaagaccu

SEQ ID NO: 66964 - RNA, 23 nt, Artificial Sequence
  Chemically synthesized
uuuugccuccauccucaaagacc

SEQ ID NO: 66965 - RNA, 23 nt, Artificial Sequence
  Chemically synthesized
cuuuugccuccauccucaaagac

SEQ ID NO: 66966 - RNA, 23 nt, Artificial Sequence
  Chemically synthesized
ccuuuugccuccauccucaaaga

SEQ ID NO: 66967 - RNA, 23 nt, Artificial Sequence
  Chemically synthesized
accgagagaaguuccaacgcagc

SEQ ID NO: 66968 - RNA, 23 nt, Artificial Sequence
  Chemically synthesized
caccgagagaaguuccaacgcag

SEQ ID NO: 66969 - RNA, 23 nt, Artificial Sequence
  Chemically synthesized
gcaccgagagaaguuccaacgca

SEQ ID NO: 66970 - RNA, 23 nt, Artificial Sequence
  Chemically synthesized
cgcaccgagagaaguuccaacgc

SEQ ID NO: 66971 - RNA, 23 nt, Artificial Sequence
  Chemically synthesized
gcgcaccgagagaaguuccaacg

SEQ ID NO: 66972 - RNA, 23 nt, Artificial Sequence
  Chemically synthesized
gaagaaauccgaaauaccacccu

SEQ ID NO: 66973 - RNA, 23 nt, Artificial Sequence
  Chemically synthesized
gaaauccgaaauaccacccugca

SEQ ID NO: 66974 - RNA, 23 nt, Artificial Sequence
  Chemically synthesized
cagucuuacacagugugggccau

SEQ ID NO: 66975 - RNA, 23 nt, Artificial Sequence
  Chemically synthesized
ccuauguaugcaaugcuccucag

SEQ ID NO: 66976 - RNA, 23 nt, Artificial Sequence
  Chemically synthesized
gaguaugaccuggugcugcuguu

SEQ ID NO: 66977 - RNA, 23 nt, Artificial Sequence
  Chemically synthesized
gacuauuuugagggcaguggauu

SEQ ID NO: 66978 - RNA, 23 nt, Artificial Sequence
  Chemically synthesized
caguuugaguggcuggcugacau

SEQ ID NO: 66979 - RNA, 23 nt, Artificial Sequence
  Chemically synthesized
ucaagucauccgucagcugccaa

SEQ ID NO: 66980 - RNA, 23 nt, Artificial Sequence
  Chemically synthesized
cuccugaggaaaagucucgccuu

SEQ ID NO: 66981 - RNA, 23 nt, Artificial Sequence
  Chemically synthesized
acuacuacgccuuugccgcacau

SEQ ID NO: 66982 - RNA, 23 nt, Artificial Sequence
  Chemically synthesized
ggacauccugguggucuucauga

SEQ ID NO: 66983 - RNA, 23 nt, Artificial Sequence
  Chemically synthesized
guccuugaacaauuugugcggcu

SEQ ID NO: 66984 - RNA, 23 nt, Artificial Sequence
  Chemically synthesized
cucuuccaugaugaugggucuga

SEQ ID NO: 66985 - RNA, 23 nt, Artificial Sequence
  Chemically synthesized
ccucuuccaugaugaugggucug

SEQ ID NO: 66986 - RNA, 23 nt, Artificial Sequence
  Chemically synthesized
gaaguucgaccucaggaccacua

SEQ ID NO: 66987 - RNA, 23 nt, Artificial Sequence
  Chemically synthesized
cuauuucuggcugccucagccuu

SEQ ID NO: 66988 - RNA, 23 nt, Artificial Sequence
  Chemically synthesized
agaauguggaaaaggccugucag

SEQ ID NO: 66989 - RNA, 23 nt, Artificial Sequence
  Chemically synthesized
agagaaguuccaacgcagcuguc

SEQ ID NO: 66990 - RNA, 23 nt, Artificial Sequence
  Chemically synthesized
ggcuguucuccaagaaggagauu

SEQ ID NO: 66991 - RNA, 23 nt, Artificial Sequence
  Chemically synthesized
ccucugcuuccagacuucagaaa

SEQ ID NO: 66992 - RNA, 23 nt, Artificial Sequence
  Chemically synthesized
gagaaguuccaacgcagcugucu

SEQ ID NO: 66993 - RNA, 23 nt, Artificial Sequence
  Chemically synthesized
cuacugguuugagaacaccagga

SEQ ID NO: 66994 - RNA, 23 nt, Artificial Sequence
  Chemically synthesized
caaccuuguuccagguggccaua

SEQ ID NO: 66995 - RNA, 23 nt, Artificial Sequence
  Chemically synthesized
gaagguucugaaccggagucuau

SEQ ID NO: 66996 - RNA, 23 nt, Artificial Sequence
  Chemically synthesized
accuuccugcgagaaaccuuccu

SEQ ID NO: 66997 - RNA, 23 nt, Artificial Sequence
  Chemically synthesized
acgucauuccagcccuugcuguu

SEQ ID NO: 66998 - RNA, 23 nt, Artificial Sequence
  Chemically synthesized
agccuccuacaucagccaggaua

SEQ ID NO: 66999 - RNA, 23 nt, Artificial Sequence
  Chemically synthesized
uuauguuccgcauguacgacuuu

SEQ ID NO: 67000 - RNA, 23 nt, Artificial Sequence
  Chemically synthesized
gacauccugguggucuucaugaa

SEQ ID NO: 67001 - RNA, 23 nt, Artificial Sequence
  Chemically synthesized
gccuccuacaucagccaggauau

SEQ ID NO: 67002 - RNA, 23 nt, Artificial Sequence
  Chemically synthesized
ggugaccgcuacugguuugagaa

SEQ ID NO: 67003 - RNA, 23 nt, Artificial Sequence
  Chemically synthesized
cgaguuccucaacauucgcaucc

SEQ ID NO: 67004 - RNA, 23 nt, Artificial Sequence
  Chemically synthesized
gggcaaagugaaaccucugcuuc

SEQ ID NO: 67005 - RNA, 23 nt, Artificial Sequence
  Chemically synthesized
cugauuucccaccucccaaccuu

SEQ ID NO: 67006 - RNA, 23 nt, Artificial Sequence
  Chemically synthesized
cucuguucagcaccaucguccuu

SEQ ID NO: 67007 - RNA, 23 nt, Artificial Sequence
  Chemically synthesized
gcaaaugccuugcaggagguaga

SEQ ID NO: 67008 - RNA, 23 nt, Artificial Sequence
  Chemically synthesized
uggcaaaugccuugcaggaggua

SEQ ID NO: 67009 - RNA, 23 nt, Artificial Sequence
  Chemically synthesized
ggaugugucucagccuggagaaa

SEQ ID NO: 67010 - RNA, 23 nt, Artificial Sequence
  Chemically synthesized
guggaaaaggccugucagcucau

SEQ ID NO: 67011 - RNA, 23 nt, Artificial Sequence
  Chemically synthesized
ccuccuacaucagccaggauaug

SEQ ID NO: 67012 - RNA, 23 nt, Artificial Sequence
  Chemically synthesized
guggaggugccugaagucaucaa

SEQ ID NO: 67013 - RNA, 23 nt, Artificial Sequence
  Chemically synthesized
uggaguccauguucucucuggcu

SEQ ID NO: 67014 - RNA, 23 nt, Artificial Sequence
  Chemically synthesized
agaccuuuuucaggcaccuuuuc

SEQ ID NO: 67015 - RNA, 23 nt, Artificial Sequence
  Chemically synthesized
gugcucugcagcccaaugucuuu

SEQ ID NO: 67016 - RNA, 23 nt, Artificial Sequence
  Chemically synthesized
cuucuuuggcuaucacgugcuuu

SEQ ID NO: 67017 - RNA, 23 nt, Artificial Sequence
  Chemically synthesized
ucuucuuuggcuaucacgugcuu

SEQ ID NO: 67018 - RNA, 23 nt, Artificial Sequence
  Chemically synthesized
agaagguucugaaccggagucua

SEQ ID NO: 67019 - RNA, 23 nt, Artificial Sequence
  Chemically synthesized
agacugaguugacaccucagaga

SEQ ID NO: 67020 - RNA, 23 nt, Artificial Sequence
  Chemically synthesized
ccagauacccaaagcuguaccuu

SEQ ID NO: 67021 - RNA, 23 nt, Artificial Sequence
  Chemically synthesized
uuccuggucccagcaaucaucua

SEQ ID NO: 67022 - RNA, 23 nt, Artificial Sequence
  Chemically synthesized
uuccuggccucuuccaugaugau

SEQ ID NO: 67023 - RNA, 23 nt, Artificial Sequence
  Chemically synthesized
cauguggugaauguguaccuguu

SEQ ID NO: 67024 - RNA, 23 nt, Artificial Sequence
  Chemically synthesized
gccugaagucaucaaggaccucu

SEQ ID NO: 67025 - RNA, 23 nt, Artificial Sequence
  Chemically synthesized
cuuugaugggaauggccucauuu

SEQ ID NO: 67026 - RNA, 23 nt, Artificial Sequence
  Chemically synthesized
acuuugaugggaauggccucauu

SEQ ID NO: 67027 - RNA, 23 nt, Artificial Sequence
  Chemically synthesized
ccacugaaguuuucccgcacaga

SEQ ID NO: 67028 - RNA, 23 nt, Artificial Sequence
  Chemically synthesized
acacucccggaguauacaggaua

SEQ ID NO: 67029 - RNA, 23 nt, Artificial Sequence
  Chemically synthesized
ggaaaaggccugucagcucauca

SEQ ID NO: 67030 - RNA, 23 nt, Artificial Sequence
  Chemically synthesized
gaagcuuuggaauggcaaggcca

SEQ ID NO: 67031 - RNA, 23 nt, Artificial Sequence
  Chemically synthesized
gggcuguucuccaagaaggagau

SEQ ID NO: 67032 - RNA, 23 nt, Artificial Sequence
  Chemically synthesized
cacugaaguuuucccgcacagac

SEQ ID NO: 67033 - RNA, 23 nt, Artificial Sequence
  Chemically synthesized
gucuacaugagaaaugccagcug

SEQ ID NO: 67034 - RNA, 23 nt, Artificial Sequence
  Chemically synthesized
guauacaggauaccggccauuuc

SEQ ID NO: 67035 - RNA, 23 nt, Artificial Sequence
  Chemically synthesized
gaguauacaggauaccggccauu

SEQ ID NO: 67036 - RNA, 23 nt, Artificial Sequence
  Chemically synthesized
acaaaucucagaagacaagcuga

SEQ ID NO: 67037 - RNA, 23 nt, Artificial Sequence
  Chemically synthesized
ugagaaguucgaccucaggacca

SEQ ID NO: 67038 - RNA, 23 nt, Artificial Sequence
  Chemically synthesized
ggugucugugcacaucuacauca

SEQ ID NO: 67039 - RNA, 23 nt, Artificial Sequence
  Chemically synthesized
uccugauccuggccaucauguau

SEQ ID NO: 67040 - RNA, 23 nt, Artificial Sequence
  Chemically synthesized
cuccugauccuggccaucaugua

SEQ ID NO: 67041 - RNA, 23 nt, Artificial Sequence
  Chemically synthesized
gucuuacacagugugggccaugu

SEQ ID NO: 67042 - RNA, 23 nt, Artificial Sequence
  Chemically synthesized
ugagacugaguugacaccucaga

SEQ ID NO: 67043 - RNA, 23 nt, Artificial Sequence
  Chemically synthesized
ugaguucaucaggaugcugagau

SEQ ID NO: 67044 - RNA, 23 nt, Artificial Sequence
  Chemically synthesized
ggucuucaugaaaggcucuccug

SEQ ID NO: 67045 - RNA, 23 nt, Artificial Sequence
  Chemically synthesized
gaaggucaacuucguccugucca

SEQ ID NO: 67046 - RNA, 23 nt, Artificial Sequence
  Chemically synthesized
acagaaggucaacuucguccugu

SEQ ID NO: 67047 - RNA, 23 nt, Artificial Sequence
  Chemically synthesized
aggacuuauccuggcuagagcug

SEQ ID NO: 67048 - RNA, 23 nt, Artificial Sequence
  Chemically synthesized
ucagacccuggcccaauaccuau

SEQ ID NO: 67049 - RNA, 23 nt, Artificial Sequence
  Chemically synthesized
caaaucucagaagacaagcugac

SEQ ID NO: 67050 - RNA, 23 nt, Artificial Sequence
  Chemically synthesized
uggaaaaggccugucagcucauc

SEQ ID NO: 67051 - RNA, 23 nt, Artificial Sequence
  Chemically synthesized
acauccugcucuauguccugcuc

SEQ ID NO: 67052 - RNA, 23 nt, Artificial Sequence
  Chemically synthesized
ggauuccaggacaaggaggaacu

SEQ ID NO: 67053 - RNA, 23 nt, Artificial Sequence
  Chemically synthesized
agcaucgugucugagaagcucgu

SEQ ID NO: 67054 - RNA, 23 nt, Artificial Sequence
  Chemically synthesized
gaacaccaggaaugggcuguucu

SEQ ID NO: 67055 - RNA, 23 nt, Artificial Sequence
  Chemically synthesized
ccaagccuacaaagugcugaaga

SEQ ID NO: 67056 - RNA, 23 nt, Artificial Sequence
  Chemically synthesized
caaagaccuggucuucaagucau

SEQ ID NO: 67057 - RNA, 23 nt, Artificial Sequence
  Chemically synthesized
gccagauacccaaagcuguaccu

SEQ ID NO: 67058 - RNA, 23 nt, Artificial Sequence
  Chemically synthesized
gcuuugaguacaagucagggcag

SEQ ID NO: 67059 - RNA, 23 nt, Artificial Sequence
  Chemically synthesized
acuggugguucuuccagaccgua

SEQ ID NO: 67060 - RNA, 23 nt, Artificial Sequence
  Chemically synthesized
gucuucaugaaaggcucuccuga

SEQ ID NO: 67061 - RNA, 23 nt, Artificial Sequence
  Chemically synthesized
ccucuguugcuucccuuugguga

SEQ ID NO: 67062 - RNA, 23 nt, Artificial Sequence
  Chemically synthesized
agaacaccaggaaugggcuguuc

SEQ ID NO: 67063 - RNA, 23 nt, Artificial Sequence
  Chemically synthesized
gugucucagccuggagaaauggu

SEQ ID NO: 67064 - RNA, 23 nt, Artificial Sequence
  Chemically synthesized
aguauacaggauaccggccauuu

SEQ ID NO: 67065 - RNA, 23 nt, Artificial Sequence
  Chemically synthesized
ggcaaagugaaaccucugcuucc

SEQ ID NO: 67066 - RNA, 23 nt, Artificial Sequence
  Chemically synthesized
cuggcaugaccaagaauguggaa

SEQ ID NO: 67067 - RNA, 23 nt, Artificial Sequence
  Chemically synthesized
gacuuugaugggaauggccucau

SEQ ID NO: 67068 - RNA, 23 nt, Artificial Sequence
  Chemically synthesized
gaccuuuuucaggcaccuuuucu

SEQ ID NO: 67069 - RNA, 23 nt, Artificial Sequence
  Chemically synthesized
gcgucuacaugagaaaugccagc

SEQ ID NO: 67070 - RNA, 23 nt, Artificial Sequence
  Chemically synthesized
uggcaugaccaagaauguggaaa

SEQ ID NO: 67071 - RNA, 23 nt, Artificial Sequence
  Chemically synthesized
gcuucacgcagcucugugucaaa

SEQ ID NO: 67072 - RNA, 23 nt, Artificial Sequence
  Chemically synthesized
ggaugaguucaucaggaugcuga

SEQ ID NO: 67073 - RNA, 23 nt, Artificial Sequence
  Chemically synthesized
aggaugaguucaucaggaugcug

SEQ ID NO: 67074 - RNA, 23 nt, Artificial Sequence
  Chemically synthesized
cuggacauccugguggucuucau

SEQ ID NO: 67075 - RNA, 23 nt, Artificial Sequence
  Chemically synthesized
gagaccuuuuucaggcaccuuuu

SEQ ID NO: 67076 - RNA, 23 nt, Artificial Sequence
  Chemically synthesized
ucauccgucagcugccaaguguu

SEQ ID NO: 67077 - RNA, 23 nt, Artificial Sequence
  Chemically synthesized
aggcaccuccuggagaccuuuuu

SEQ ID NO: 67078 - RNA, 23 nt, Artificial Sequence
  Chemically synthesized
gcuguucuccaagaaggagauug

SEQ ID NO: 67079 - RNA, 23 nt, Artificial Sequence
  Chemically synthesized
caccuaccagaacaucgcugugu

SEQ ID NO: 67080 - RNA, 23 nt, Artificial Sequence
  Chemically synthesized
agaagacaagcugaccugacaag

SEQ ID NO: 67081 - RNA, 23 nt, Artificial Sequence
  Chemically synthesized
gcagugucuagggacuagaguga

SEQ ID NO: 67082 - RNA, 23 nt, Artificial Sequence
  Chemically synthesized
gcugacaaggauggcaauggcua

SEQ ID NO: 67083 - RNA, 23 nt, Artificial Sequence
  Chemically synthesized
uguucuccaagaaggagauugaa

SEQ ID NO: 67084 - RNA, 23 nt, Artificial Sequence
  Chemically synthesized
gcacuuccagaagguucugaacc

SEQ ID NO: 67085 - RNA, 23 nt, Artificial Sequence
  Chemically synthesized
cuccauccucaaagaccuggucu

SEQ ID NO: 67086 - RNA, 23 nt, Artificial Sequence
  Chemically synthesized
acgggugacagaugugccagaua

SEQ ID NO: 67087 - RNA, 23 nt, Artificial Sequence
  Chemically synthesized
ccugcucuauguccugcucauca

SEQ ID NO: 67088 - RNA, 23 nt, Artificial Sequence
  Chemically synthesized
uccuuccgagaguuccuggacau

SEQ ID NO: 67089 - RNA, 23 nt, Artificial Sequence
  Chemically synthesized
caaggauggcaauggcuaccugu

SEQ ID NO: 67090 - RNA, 23 nt, Artificial Sequence
  Chemically synthesized
cagaagacaagcugaccugacaa

SEQ ID NO: 67091 - RNA, 23 nt, Artificial Sequence
  Chemically synthesized
gaagaucuacuucaucuggguga

SEQ ID NO: 67092 - RNA, 23 nt, Artificial Sequence
  Chemically synthesized
acaaggauggcaauggcuaccug

SEQ ID NO: 67093 - RNA, 23 nt, Artificial Sequence
  Chemically synthesized
aggaugugucucagccuggagaa

SEQ ID NO: 67094 - RNA, 23 nt, Artificial Sequence
  Chemically synthesized
agaagaucuacuucaucugggug

SEQ ID NO: 67095 - RNA, 23 nt, Artificial Sequence
  Chemically synthesized
uccauccucaaagaccuggucuu

SEQ ID NO: 67096 - RNA, 23 nt, Artificial Sequence
  Chemically synthesized
caucuucuuccuggucccagcaa

SEQ ID NO: 67097 - RNA, 23 nt, Artificial Sequence
  Chemically synthesized
gagauccuucaucgagaucucca

SEQ ID NO: 67098 - RNA, 23 nt, Artificial Sequence
  Chemically synthesized
aagacaagcugaccugacaagua

SEQ ID NO: 67099 - RNA, 23 nt, Artificial Sequence
  Chemically synthesized
auccugcucuauguccugcucau

SEQ ID NO: 67100 - RNA, 23 nt, Artificial Sequence
  Chemically synthesized
gcaaagugaaaccucugcuucca

SEQ ID NO: 67101 - RNA, 23 nt, Artificial Sequence
  Chemically synthesized
ccauccucaaagaccuggucuuc

SEQ ID NO: 67102 - RNA, 23 nt, Artificial Sequence
  Chemically synthesized
ugagaaaugccagcugccacuuc

SEQ ID NO: 67103 - RNA, 23 nt, Artificial Sequence
  Chemically synthesized
caagaauguggaaaaggccuguc

SEQ ID NO: 67104 - RNA, 23 nt, Artificial Sequence
  Chemically synthesized
ucauccgagagguggaggagaau

SEQ ID NO: 67105 - RNA, 23 nt, Artificial Sequence
  Chemically synthesized
ccguuuccacaucuucuuccugg

SEQ ID NO: 67106 - RNA, 23 nt, Artificial Sequence
  Chemically synthesized
cucagaagacaagcugaccugac

SEQ ID NO: 67107 - RNA, 23 nt, Artificial Sequence
  Chemically synthesized
uccacaucuucuuccugguccca

SEQ ID NO: 67108 - RNA, 23 nt, Artificial Sequence
  Chemically synthesized
gaguugacaccucagagacugca

SEQ ID NO: 67109 - RNA, 23 nt, Artificial Sequence
  Chemically synthesized
gaccaagaauguggaaaaggccu

SEQ ID NO: 67110 - RNA, 23 nt, Artificial Sequence
  Chemically synthesized
ccaagaauguggaaaaggccugu

SEQ ID NO: 67111 - RNA, 23 nt, Artificial Sequence
  Chemically synthesized
aaccuugggugaaauuaguugug

SEQ ID NO: 67112 - RNA, 23 nt, Artificial Sequence
  Chemically synthesized
accuugggugaaauuaguugugg

SEQ ID NO: 67113 - RNA, 23 nt, Artificial Sequence
  Chemically synthesized
ccuugggugaaauuaguuguggu

SEQ ID NO: 67114 - RNA, 23 nt, Artificial Sequence
  Chemically synthesized
cuugggugaaauuaguuguggug

SEQ ID NO: 67115 - RNA, 23 nt, Artificial Sequence
  Chemically synthesized
uugggugaaauuaguuguggugu

SEQ ID NO: 67116 - RNA, 23 nt, Artificial Sequence
  Chemically synthesized
ugggugaaauuaguugugguguu

SEQ ID NO: 67117 - RNA, 23 nt, Artificial Sequence
  Chemically synthesized
aaaccuugggugaaauuaguugu

SEQ ID NO: 67118 - RNA, 23 nt, Artificial Sequence
  Chemically synthesized
aaagaacgugcuuaaaaccuugg

SEQ ID NO: 67119 - RNA, 23 nt, Artificial Sequence
  Chemically synthesized
aagaacgugcuuaaaaccuuggg

SEQ ID NO: 67120 - RNA, 23 nt, Artificial Sequence
  Chemically synthesized
agaacgugcuuaaaaccuugggu

SEQ ID NO: 67121 - RNA, 23 nt, Artificial Sequence
  Chemically synthesized
gaacgugcuuaaaaccuugggug

SEQ ID NO: 67122 - RNA, 23 nt, Artificial Sequence
  Chemically synthesized
aacgugcuuaaaaccuuggguga

SEQ ID NO: 67123 - RNA, 23 nt, Artificial Sequence
  Chemically synthesized
ugagauuuguuucugaagucugg

SEQ ID NO: 67124 - RNA, 23 nt, Artificial Sequence
  Chemically synthesized
gagauuuguuucugaagucugga

SEQ ID NO: 67125 - RNA, 23 nt, Artificial Sequence
  Chemically synthesized
agauuuguuucugaagucuggaa

SEQ ID NO: 67126 - RNA, 23 nt, Artificial Sequence
  Chemically synthesized
gauuuguuucugaagucuggaag

SEQ ID NO: 67127 - RNA, 23 nt, Artificial Sequence
  Chemically synthesized
auuuguuucugaagucuggaagc

SEQ ID NO: 67128 - RNA, 23 nt, Artificial Sequence
  Chemically synthesized
guaggagaacaugaaagagaugc

SEQ ID NO: 67129 - RNA, 23 nt, Artificial Sequence
  Chemically synthesized
uaggagaacaugaaagagaugcu

SEQ ID NO: 67130 - RNA, 23 nt, Artificial Sequence
  Chemically synthesized
aggagaacaugaaagagaugcug

SEQ ID NO: 67131 - RNA, 23 nt, Artificial Sequence
  Chemically synthesized
ggagaacaugaaagagaugcugg

SEQ ID NO: 67132 - RNA, 23 nt, Artificial Sequence
  Chemically synthesized
gagaacaugaaagagaugcuggc

SEQ ID NO: 67133 - RNA, 23 nt, Artificial Sequence
  Chemically synthesized
acagauguacagcauaguggucc

SEQ ID NO: 67134 - RNA, 23 nt, Artificial Sequence
  Chemically synthesized
cagauguacagcauagugguccu

SEQ ID NO: 67135 - RNA, 23 nt, Artificial Sequence
  Chemically synthesized
agauguacagcauagugguccug

SEQ ID NO: 67136 - RNA, 23 nt, Artificial Sequence
  Chemically synthesized
gauguacagcauagugguccuga

SEQ ID NO: 67137 - RNA, 23 nt, Artificial Sequence
  Chemically synthesized
auguacagcauagugguccugag

SEQ ID NO: 67138 - RNA, 23 nt, Artificial Sequence
  Chemically synthesized
gggauuagaaugucccaaaaugg

SEQ ID NO: 67139 - RNA, 23 nt, Artificial Sequence
  Chemically synthesized
ggauuagaaugucccaaaaugga

SEQ ID NO: 67140 - RNA, 23 nt, Artificial Sequence
  Chemically synthesized
gauuagaaugucccaaaauggag

SEQ ID NO: 67141 - RNA, 23 nt, Artificial Sequence
  Chemically synthesized
auuagaaugucccaaaauggaga

SEQ ID NO: 67142 - RNA, 23 nt, Artificial Sequence
  Chemically synthesized
uuagaaugucccaaaauggagac

SEQ ID NO: 67143 - RNA, 23 nt, Artificial Sequence
  Chemically synthesized
acuugaguuccgauugaugaccc

SEQ ID NO: 67144 - RNA, 23 nt, Artificial Sequence
  Chemically synthesized
cuugaguuccgauugaugacccc

SEQ ID NO: 67145 - RNA, 23 nt, Artificial Sequence
  Chemically synthesized
uugaguuccgauugaugaccccc

SEQ ID NO: 67146 - RNA, 23 nt, Artificial Sequence
  Chemically synthesized
ugaguuccgauugaugacccccu

SEQ ID NO: 67147 - RNA, 23 nt, Artificial Sequence
  Chemically synthesized
gaguuccgauugaugacccccug

SEQ ID NO: 67148 - RNA, 23 nt, Artificial Sequence
  Chemically synthesized
gaguagggaggguucuaagaugc

SEQ ID NO: 67149 - RNA, 23 nt, Artificial Sequence
  Chemically synthesized
aguagggaggguucuaagaugcc

SEQ ID NO: 67150 - RNA, 23 nt, Artificial Sequence
  Chemically synthesized
guagggaggguucuaagaugcca

SEQ ID NO: 67151 - RNA, 23 nt, Artificial Sequence
  Chemically synthesized
uagggaggguucuaagaugccag

SEQ ID NO: 67152 - RNA, 23 nt, Artificial Sequence
  Chemically synthesized
agggaggguucuaagaugccagc

SEQ ID NO: 67153 - RNA, 23 nt, Artificial Sequence
  Chemically synthesized
agcccaugaugaaaauaauaggg

SEQ ID NO: 67154 - RNA, 23 nt, Artificial Sequence
  Chemically synthesized
gcccaugaugaaaauaauagggg

SEQ ID NO: 67155 - RNA, 23 nt, Artificial Sequence
  Chemically synthesized
cccaugaugaaaauaauaggggc

SEQ ID NO: 67156 - RNA, 23 nt, Artificial Sequence
  Chemically synthesized
ccaugaugaaaauaauaggggcu

SEQ ID NO: 67157 - RNA, 23 nt, Artificial Sequence
  Chemically synthesized
caugaugaaaauaauaggggcuc

SEQ ID NO: 67158 - RNA, 23 nt, Artificial Sequence
  Chemically synthesized
ugccaucuaccacacggaucugc

SEQ ID NO: 67159 - RNA, 23 nt, Artificial Sequence
  Chemically synthesized
gccaucuaccacacggaucugcc

SEQ ID NO: 67160 - RNA, 23 nt, Artificial Sequence
  Chemically synthesized
ccaucuaccacacggaucugccc

SEQ ID NO: 67161 - RNA, 23 nt, Artificial Sequence
  Chemically synthesized
caucuaccacacggaucugcccg

SEQ ID NO: 67162 - RNA, 23 nt, Artificial Sequence
  Chemically synthesized
aucuaccacacggaucugcccgg

SEQ ID NO: 67163 - RNA, 23 nt, Artificial Sequence
  Chemically synthesized
cccguagccgcacaaauuguuca

SEQ ID NO: 67164 - RNA, 23 nt, Artificial Sequence
  Chemically synthesized
ccguagccgcacaaauuguucaa

SEQ ID NO: 67165 - RNA, 23 nt, Artificial Sequence
  Chemically synthesized
cguagccgcacaaauuguucaag

SEQ ID NO: 67166 - RNA, 23 nt, Artificial Sequence
  Chemically synthesized
guagccgcacaaauuguucaagg

SEQ ID NO: 67167 - RNA, 23 nt, Artificial Sequence
  Chemically synthesized
uagccgcacaaauuguucaagga

SEQ ID NO: 67168 - RNA, 23 nt, Artificial Sequence
  Chemically synthesized
cacuugaguuccgauugaugacc

SEQ ID NO: 67169 - RNA, 23 nt, Artificial Sequence
  Chemically synthesized
acgugcuuaaaaccuugggugaa

SEQ ID NO: 67170 - RNA, 23 nt, Artificial Sequence
  Chemically synthesized
aaaaccuugggugaaauuaguug

SEQ ID NO: 67171 - RNA, 23 nt, Artificial Sequence
  Chemically synthesized
guggguuucuguaaauggcuugc

SEQ ID NO: 67172 - RNA, 23 nt, Artificial Sequence
  Chemically synthesized
uggguuucuguaaauggcuugcc

SEQ ID NO: 67173 - RNA, 23 nt, Artificial Sequence
  Chemically synthesized
ggguuucuguaaauggcuugcca

SEQ ID NO: 67174 - RNA, 23 nt, Artificial Sequence
  Chemically synthesized
gguuucuguaaauggcuugccau

SEQ ID NO: 67175 - RNA, 23 nt, Artificial Sequence
  Chemically synthesized
guuucuguaaauggcuugccaug

SEQ ID NO: 67176 - RNA, 23 nt, Artificial Sequence
  Chemically synthesized
aacaugaaagagaugcuggcugc

SEQ ID NO: 67177 - RNA, 23 nt, Artificial Sequence
  Chemically synthesized
acaugaaagagaugcuggcugcu

SEQ ID NO: 67178 - RNA, 23 nt, Artificial Sequence
  Chemically synthesized
caugaaagagaugcuggcugcug

SEQ ID NO: 67179 - RNA, 23 nt, Artificial Sequence
  Chemically synthesized
augaaagagaugcuggcugcugu

SEQ ID NO: 67180 - RNA, 23 nt, Artificial Sequence
  Chemically synthesized
ugaaagagaugcuggcugcugug

SEQ ID NO: 67181 - RNA, 23 nt, Artificial Sequence
  Chemically synthesized
ugcguuggaacuucucucggugc

SEQ ID NO: 67182 - RNA, 23 nt, Artificial Sequence
  Chemically synthesized
gcguuggaacuucucucggugcg

SEQ ID NO: 67183 - RNA, 23 nt, Artificial Sequence
  Chemically synthesized
cguuggaacuucucucggugcgc

SEQ ID NO: 67184 - RNA, 23 nt, Artificial Sequence
  Chemically synthesized
guuggaacuucucucggugcgcc

SEQ ID NO: 67185 - RNA, 23 nt, Artificial Sequence
  Chemically synthesized
uuggaacuucucucggugcgccu

SEQ ID NO: 67186 - RNA, 23 nt, Artificial Sequence
  Chemically synthesized
gucguacaugcggaacauaaggc

SEQ ID NO: 67187 - RNA, 23 nt, Artificial Sequence
  Chemically synthesized
ucguacaugcggaacauaaggcg

SEQ ID NO: 67188 - RNA, 23 nt, Artificial Sequence
  Chemically synthesized
cguacaugcggaacauaaggcga

SEQ ID NO: 67189 - RNA, 23 nt, Artificial Sequence
  Chemically synthesized
guacaugcggaacauaaggcgag

SEQ ID NO: 67190 - RNA, 23 nt, Artificial Sequence
  Chemically synthesized
uacaugcggaacauaaggcgaga

SEQ ID NO: 67191 - RNA, 23 nt, Artificial Sequence
  Chemically synthesized
uuuaugccagacaaagacauugg

SEQ ID NO: 67192 - RNA, 23 nt, Artificial Sequence
  Chemically synthesized
uuaugccagacaaagacauuggg

SEQ ID NO: 67193 - RNA, 23 nt, Artificial Sequence
  Chemically synthesized
uaugccagacaaagacauugggc

SEQ ID NO: 67194 - RNA, 23 nt, Artificial Sequence
  Chemically synthesized
augccagacaaagacauugggcu

SEQ ID NO: 67195 - RNA, 23 nt, Artificial Sequence
  Chemically synthesized
ugccagacaaagacauugggcug

SEQ ID NO: 67196 - RNA, 23 nt, Artificial Sequence
  Chemically synthesized
ccaguacagugucauugcuccgg

SEQ ID NO: 67197 - RNA, 23 nt, Artificial Sequence
  Chemically synthesized
caguacagugucauugcuccggg

SEQ ID NO: 67198 - RNA, 23 nt, Artificial Sequence
  Chemically synthesized
aguacagugucauugcuccggga

SEQ ID NO: 67199 - RNA, 23 nt, Artificial Sequence
  Chemically synthesized
guacagugucauugcuccgggag

SEQ ID NO: 67200 - RNA, 23 nt, Artificial Sequence
  Chemically synthesized
uacagugucauugcuccgggaga

SEQ ID NO: 67201 - RNA, 23 nt, Artificial Sequence
  Chemically synthesized
acacuugaguuccgauugaugac

SEQ ID NO: 67202 - RNA, 23 nt, Artificial Sequence
  Chemically synthesized
gagaugguguugcuaaggucucg

SEQ ID NO: 67203 - RNA, 23 nt, Artificial Sequence
  Chemically synthesized
agaugguguugcuaaggucucgg

SEQ ID NO: 67204 - RNA, 23 nt, Artificial Sequence
  Chemically synthesized
gaugguguugcuaaggucucggg

SEQ ID NO: 67205 - RNA, 23 nt, Artificial Sequence
  Chemically synthesized
augguguugcuaaggucucgggg

SEQ ID NO: 67206 - RNA, 23 nt, Artificial Sequence
  Chemically synthesized
ugguguugcuaaggucucggggg

SEQ ID NO: 67207 - RNA, 23 nt, Artificial Sequence
  Chemically synthesized
auuaguugugguguuagacuggg

SEQ ID NO: 67208 - RNA, 23 nt, Artificial Sequence
  Chemically synthesized
uuaguugugguguuagacugggg

SEQ ID NO: 67209 - RNA, 23 nt, Artificial Sequence
  Chemically synthesized
uaguugugguguuagacuggggu

SEQ ID NO: 67210 - RNA, 23 nt, Artificial Sequence
  Chemically synthesized
aguugugguguuagacuggggug

SEQ ID NO: 67211 - RNA, 23 nt, Artificial Sequence
  Chemically synthesized
guugugguguuagacuggggugc

SEQ ID NO: 67212 - RNA, 23 nt, Artificial Sequence
  Chemically synthesized
ggccuagaaguucucauaauggu

SEQ ID NO: 67213 - RNA, 23 nt, Artificial Sequence
  Chemically synthesized
gccuagaaguucucauaauggug

SEQ ID NO: 67214 - RNA, 23 nt, Artificial Sequence
  Chemically synthesized
ccuagaaguucucauaauggugg

SEQ ID NO: 67215 - RNA, 23 nt, Artificial Sequence
  Chemically synthesized
cuagaaguucucauaaugguggg

SEQ ID NO: 67216 - RNA, 23 nt, Artificial Sequence
  Chemically synthesized
uagaaguucucauaaugguggga

SEQ ID NO: 67217 - RNA, 23 nt, Artificial Sequence
  Chemically synthesized
cuccaaaugguccaucaagguac

SEQ ID NO: 67218 - RNA, 23 nt, Artificial Sequence
  Chemically synthesized
uccaaaugguccaucaagguaca

SEQ ID NO: 67219 - RNA, 23 nt, Artificial Sequence
  Chemically synthesized
ccaaaugguccaucaagguacag

SEQ ID NO: 67220 - RNA, 23 nt, Artificial Sequence
  Chemically synthesized
caaaugguccaucaagguacagc

SEQ ID NO: 67221 - RNA, 23 nt, Artificial Sequence
  Chemically synthesized
aaaugguccaucaagguacagcu

SEQ ID NO: 67222 - RNA, 23 nt, Artificial Sequence
  Chemically synthesized
caggaaagaggcaagagaggacg

SEQ ID NO: 67223 - RNA, 23 nt, Artificial Sequence
  Chemically synthesized
aggaaagaggcaagagaggacgc

SEQ ID NO: 67224 - RNA, 23 nt, Artificial Sequence
  Chemically synthesized
ggaaagaggcaagagaggacgcu

SEQ ID NO: 67225 - RNA, 23 nt, Artificial Sequence
  Chemically synthesized
gaaagaggcaagagaggacgcug

SEQ ID NO: 67226 - RNA, 23 nt, Artificial Sequence
  Chemically synthesized
aaagaggcaagagaggacgcuga

SEQ ID NO: 67227 - RNA, 23 nt, Artificial Sequence
  Chemically synthesized
guguaagacugugaggacgaugg

SEQ ID NO: 67228 - RNA, 23 nt, Artificial Sequence
  Chemically synthesized
uguaagacugugaggacgauggc

SEQ ID NO: 67229 - RNA, 23 nt, Artificial Sequence
  Chemically synthesized
guaagacugugaggacgauggcg

SEQ ID NO: 67230 - RNA, 23 nt, Artificial Sequence
  Chemically synthesized
uaagacugugaggacgauggcgg

SEQ ID NO: 67231 - RNA, 23 nt, Artificial Sequence
  Chemically synthesized
aagacugugaggacgauggcggu

SEQ ID NO: 67232 - RNA, 23 nt, Artificial Sequence
  Chemically synthesized
gauguaggagaacaugaaagaga

SEQ ID NO: 67233 - RNA, 23 nt, Artificial Sequence
  Chemically synthesized
auguaggagaacaugaaagagau

SEQ ID NO: 67234 - RNA, 23 nt, Artificial Sequence
  Chemically synthesized
uguaggagaacaugaaagagaug

SEQ ID NO: 67235 - RNA, 23 nt, Artificial Sequence
  Chemically synthesized
agaacaugaaagagaugcuggcu

SEQ ID NO: 67236 - RNA, 23 nt, Artificial Sequence
  Chemically synthesized
gaacaugaaagagaugcuggcug

SEQ ID NO: 67237 - RNA, 23 nt, Artificial Sequence
  Chemically synthesized
cuggaaugacguuaccuucuugc

SEQ ID NO: 67238 - RNA, 23 nt, Artificial Sequence
  Chemically synthesized
uggaaugacguuaccuucuugcc

SEQ ID NO: 67239 - RNA, 23 nt, Artificial Sequence
  Chemically synthesized
ggaaugacguuaccuucuugcca

SEQ ID NO: 67240 - RNA, 23 nt, Artificial Sequence
  Chemically synthesized
gaaugacguuaccuucuugccaa

SEQ ID NO: 67241 - RNA, 23 nt, Artificial Sequence
  Chemically synthesized
aaugacguuaccuucuugccaaa

SEQ ID NO: 67242 - RNA, 23 nt, Artificial Sequence
  Chemically synthesized
ggaacauaaggcgagacuuuucc

SEQ ID NO: 67243 - RNA, 23 nt, Artificial Sequence
  Chemically synthesized
gaacauaaggcgagacuuuuccu

SEQ ID NO: 67244 - RNA, 23 nt, Artificial Sequence
  Chemically synthesized
aacauaaggcgagacuuuuccuc

SEQ ID NO: 67245 - RNA, 23 nt, Artificial Sequence
  Chemically synthesized
acauaaggcgagacuuuuccuca

SEQ ID NO: 67246 - RNA, 23 nt, Artificial Sequence
  Chemically synthesized
cauaaggcgagacuuuuccucag

SEQ ID NO: 67247 - RNA, 23 nt, Artificial Sequence
  Chemically synthesized
caccaaagggaagcaacagaggg

SEQ ID NO: 67248 - RNA, 23 nt, Artificial Sequence
  Chemically synthesized
accaaagggaagcaacagagggu

SEQ ID NO: 67249 - RNA, 23 nt, Artificial Sequence
  Chemically synthesized
ccaaagggaagcaacagaggguc

SEQ ID NO: 67250 - RNA, 23 nt, Artificial Sequence
  Chemically synthesized
caaagggaagcaacagagggucc

SEQ ID NO: 67251 - RNA, 23 nt, Artificial Sequence
  Chemically synthesized
aaagggaagcaacagaggguccc

SEQ ID NO: 67252 - RNA, 23 nt, Artificial Sequence
  Chemically synthesized
aagggaagcaacagagggucccg

SEQ ID NO: 67253 - RNA, 23 nt, Artificial Sequence
  Chemically synthesized
gccagacaaagacauugggcugc

SEQ ID NO: 67254 - RNA, 23 nt, Artificial Sequence
  Chemically synthesized
ccagacaaagacauugggcugca

SEQ ID NO: 67255 - RNA, 23 nt, Artificial Sequence
  Chemically synthesized
cagacaaagacauugggcugcag

SEQ ID NO: 67256 - RNA, 23 nt, Artificial Sequence
  Chemically synthesized
agacaaagacauugggcugcaga

SEQ ID NO: 67257 - RNA, 23 nt, Artificial Sequence
  Chemically synthesized
gacaaagacauugggcugcagag

SEQ ID NO: 67258 - RNA, 23 nt, Artificial Sequence
  Chemically synthesized
ucggauuucuucaaucuccuucu

SEQ ID NO: 67259 - RNA, 23 nt, Artificial Sequence
  Chemically synthesized
cggauuucuucaaucuccuucuu

SEQ ID NO: 67260 - RNA, 23 nt, Artificial Sequence
  Chemically synthesized
ggauuucuucaaucuccuucuug

SEQ ID NO: 67261 - RNA, 23 nt, Artificial Sequence
  Chemically synthesized
gauuucuucaaucuccuucuugg

SEQ ID NO: 67262 - RNA, 23 nt, Artificial Sequence
  Chemically synthesized
auuucuucaaucuccuucuugga

SEQ ID NO: 67263 - RNA, 23 nt, Artificial Sequence
  Chemically synthesized
agaaguucucauaauggugggag

SEQ ID NO: 67264 - RNA, 23 nt, Artificial Sequence
  Chemically synthesized
gaaguucucauaauggugggaga

SEQ ID NO: 67265 - RNA, 23 nt, Artificial Sequence
  Chemically synthesized
gaucuucuuacagaacacuuggc

SEQ ID NO: 67266 - RNA, 23 nt, Artificial Sequence
  Chemically synthesized
aucuucuuacagaacacuuggca

SEQ ID NO: 67267 - RNA, 23 nt, Artificial Sequence
  Chemically synthesized
ucuucuuacagaacacuuggcag

SEQ ID NO: 67268 - RNA, 23 nt, Artificial Sequence
  Chemically synthesized
cuucuuacagaacacuuggcagc

SEQ ID NO: 67269 - RNA, 23 nt, Artificial Sequence
  Chemically synthesized
uucuuacagaacacuuggcagcu

SEQ ID NO: 67270 - RNA, 23 nt, Artificial Sequence
  Chemically synthesized
acacugacaccucaaacuuaugc

SEQ ID NO: 67271 - RNA, 23 nt, Artificial Sequence
  Chemically synthesized
cacugacaccucaaacuuaugcc

SEQ ID NO: 67272 - RNA, 23 nt, Artificial Sequence
  Chemically synthesized
acugacaccucaaacuuaugcca

SEQ ID NO: 67273 - RNA, 23 nt, Artificial Sequence
  Chemically synthesized
cugacaccucaaacuuaugccac

SEQ ID NO: 67274 - RNA, 23 nt, Artificial Sequence
  Chemically synthesized
ugacaccucaaacuuaugccacu

SEQ ID NO: 67275 - RNA, 23 nt, Artificial Sequence
  Chemically synthesized
gacaccucaaacuuaugccacuc

SEQ ID NO: 67276 - RNA, 23 nt, Artificial Sequence
  Chemically synthesized
acaccucaaacuuaugccacucc

SEQ ID NO: 67277 - RNA, 23 nt, Artificial Sequence
  Chemically synthesized
caccucaaacuuaugccacuccu

SEQ ID NO: 67278 - RNA, 23 nt, Artificial Sequence
  Chemically synthesized
accucaaacuuaugccacuccug

SEQ ID NO: 67279 - RNA, 23 nt, Artificial Sequence
  Chemically synthesized
ccucaaacuuaugccacuccugg

SEQ ID NO: 67280 - RNA, 23 nt, Artificial Sequence
  Chemically synthesized
cucaaacuuaugccacuccuggu

SEQ ID NO: 67281 - RNA, 23 nt, Artificial Sequence
  Chemically synthesized
aggcaaagacauacaugauggcc

SEQ ID NO: 67282 - RNA, 23 nt, Artificial Sequence
  Chemically synthesized
ggcaaagacauacaugauggcca

SEQ ID NO: 67283 - RNA, 23 nt, Artificial Sequence
  Chemically synthesized
gcaaagacauacaugauggccag

SEQ ID NO: 67284 - RNA, 23 nt, Artificial Sequence
  Chemically synthesized
caaagacauacaugauggccagg

SEQ ID NO: 67285 - RNA, 23 nt, Artificial Sequence
  Chemically synthesized
aaagacauacaugauggccagga

SEQ ID NO: 67286 - RNA, 23 nt, Artificial Sequence
  Chemically synthesized
gaagaaccaccaguaauacuucu

SEQ ID NO: 67287 - RNA, 23 nt, Artificial Sequence
  Chemically synthesized
aagaaccaccaguaauacuucug

SEQ ID NO: 67288 - RNA, 23 nt, Artificial Sequence
  Chemically synthesized
agaaccaccaguaauacuucugg

SEQ ID NO: 67289 - RNA, 23 nt, Artificial Sequence
  Chemically synthesized
gaaccaccaguaauacuucuggg

SEQ ID NO: 67290 - RNA, 23 nt, Artificial Sequence
  Chemically synthesized
aaccaccaguaauacuucugggg

SEQ ID NO: 67291 - RNA, 23 nt, Artificial Sequence
  Chemically synthesized
cacguagcgguugaggaagguuu

SEQ ID NO: 67292 - RNA, 23 nt, Artificial Sequence
  Chemically synthesized
acguagcgguugaggaagguuuc

SEQ ID NO: 67293 - RNA, 23 nt, Artificial Sequence
  Chemically synthesized
cguagcgguugaggaagguuucu

SEQ ID NO: 67294 - RNA, 23 nt, Artificial Sequence
  Chemically synthesized
guagcgguugaggaagguuucuc

SEQ ID NO: 67295 - RNA, 23 nt, Artificial Sequence
  Chemically synthesized
uagcgguugaggaagguuucucg

SEQ ID NO: 67296 - RNA, 23 nt, Artificial Sequence
  Chemically synthesized
aaccaacacaugguccucucgcu

SEQ ID NO: 67297 - RNA, 23 nt, Artificial Sequence
  Chemically synthesized
accaacacaugguccucucgcuc

SEQ ID NO: 67298 - RNA, 23 nt, Artificial Sequence
  Chemically synthesized
ccaacacaugguccucucgcucu

SEQ ID NO: 67299 - RNA, 23 nt, Artificial Sequence
  Chemically synthesized
caacacaugguccucucgcucug

SEQ ID NO: 67300 - RNA, 23 nt, Artificial Sequence
  Chemically synthesized
aacacaugguccucucgcucugc

SEQ ID NO: 67301 - RNA, 23 nt, Artificial Sequence
  Chemically synthesized
augaaagaacgugcuuaaaaccu

SEQ ID NO: 67302 - RNA, 23 nt, Artificial Sequence
  Chemically synthesized
ugaaagaacgugcuuaaaaccuu

SEQ ID NO: 67303 - RNA, 23 nt, Artificial Sequence
  Chemically synthesized
gaaagaacgugcuuaaaaccuug

SEQ ID NO: 67304 - RNA, 23 nt, Artificial Sequence
  Chemically synthesized
ggugaaauuaguugugguguuag

SEQ ID NO: 67305 - RNA, 23 nt, Artificial Sequence
  Chemically synthesized
gugaaauuaguugugguguuaga

SEQ ID NO: 67306 - RNA, 23 nt, Artificial Sequence
  Chemically synthesized
ugaaauuaguugugguguuagac

SEQ ID NO: 67307 - RNA, 23 nt, Artificial Sequence
  Chemically synthesized
gaaauuaguugugguguuagacu

SEQ ID NO: 67308 - RNA, 23 nt, Artificial Sequence
  Chemically synthesized
aaauuaguugugguguuagacug

SEQ ID NO: 67309 - RNA, 23 nt, Artificial Sequence
  Chemically synthesized
aauuaguugugguguuagacugg

SEQ ID NO: 67310 - RNA, 23 nt, Artificial Sequence
  Chemically synthesized
ccccaacacacauacagacaugc

SEQ ID NO: 67311 - RNA, 23 nt, Artificial Sequence
  Chemically synthesized
cccaacacacauacagacaugca

SEQ ID NO: 67312 - RNA, 23 nt, Artificial Sequence
  Chemically synthesized
ccaacacacauacagacaugcac

SEQ ID NO: 67313 - RNA, 23 nt, Artificial Sequence
  Chemically synthesized
caacacacauacagacaugcaca

SEQ ID NO: 67314 - RNA, 23 nt, Artificial Sequence
  Chemically synthesized
aacacacauacagacaugcacac

SEQ ID NO: 67315 - RNA, 23 nt, Artificial Sequence
  Chemically synthesized
uccccuacuucucacucuagucc

SEQ ID NO: 67316 - RNA, 23 nt, Artificial Sequence
  Chemically synthesized
ccccuacuucucacucuaguccc

SEQ ID NO: 67317 - RNA, 23 nt, Artificial Sequence
  Chemically synthesized
cccuacuucucacucuagucccu

SEQ ID NO: 67318 - RNA, 23 nt, Artificial Sequence
  Chemically synthesized
ccuacuucucacucuagucccua

SEQ ID NO: 67319 - RNA, 23 nt, Artificial Sequence
  Chemically synthesized
cuacuucucacucuagucccuag

SEQ ID NO: 67320 - RNA, 23 nt, Artificial Sequence
  Chemically synthesized
gccagaaauaggaagaacagagg

SEQ ID NO: 67321 - RNA, 23 nt, Artificial Sequence
  Chemically synthesized
ccagaaauaggaagaacagaggu

SEQ ID NO: 67322 - RNA, 23 nt, Artificial Sequence
  Chemically synthesized
cagaaauaggaagaacagaggug

SEQ ID NO: 67323 - RNA, 23 nt, Artificial Sequence
  Chemically synthesized
agaaauaggaagaacagagguga

SEQ ID NO: 67324 - RNA, 23 nt, Artificial Sequence
  Chemically synthesized
gaaauaggaagaacagaggugag

SEQ ID NO: 67325 - RNA, 23 nt, Artificial Sequence
  Chemically synthesized
ccccauagaugauugcugggacc

SEQ ID NO: 67326 - RNA, 23 nt, Artificial Sequence
  Chemically synthesized
cccauagaugauugcugggacca

SEQ ID NO: 67327 - RNA, 23 nt, Artificial Sequence
  Chemically synthesized
ccauagaugauugcugggaccag

SEQ ID NO: 67328 - RNA, 23 nt, Artificial Sequence
  Chemically synthesized
cauagaugauugcugggaccagg

SEQ ID NO: 67329 - RNA, 23 nt, Artificial Sequence
  Chemically synthesized
auagaugauugcugggaccagga

SEQ ID NO: 67330 - RNA, 23 nt, Artificial Sequence
  Chemically synthesized
aguggugggaggcaaagacauac

SEQ ID NO: 67331 - RNA, 23 nt, Artificial Sequence
  Chemically synthesized
guggugggaggcaaagacauaca

SEQ ID NO: 67332 - RNA, 23 nt, Artificial Sequence
  Chemically synthesized
uggugggaggcaaagacauacau

SEQ ID NO: 67333 - RNA, 23 nt, Artificial Sequence
  Chemically synthesized
ggugggaggcaaagacauacaug

SEQ ID NO: 67334 - RNA, 23 nt, Artificial Sequence
  Chemically synthesized
gugggaggcaaagacauacauga

SEQ ID NO: 67335 - RNA, 23 nt, Artificial Sequence
  Chemically synthesized
agggauuagaaugucccaaaaug

SEQ ID NO: 67336 - RNA, 23 nt, Artificial Sequence
  Chemically synthesized
acagcugcguuggaacuucucuc

SEQ ID NO: 67337 - RNA, 23 nt, Artificial Sequence
  Chemically synthesized
cagcugcguuggaacuucucucg

SEQ ID NO: 67338 - RNA, 23 nt, Artificial Sequence
  Chemically synthesized
agcugcguuggaacuucucucgg

SEQ ID NO: 67339 - RNA, 23 nt, Artificial Sequence
  Chemically synthesized
gcugcguuggaacuucucucggu

SEQ ID NO: 67340 - RNA, 23 nt, Artificial Sequence
  Chemically synthesized
cugcguuggaacuucucucggug

SEQ ID NO: 67341 - RNA, 23 nt, Artificial Sequence
  Chemically synthesized
ugucaacucagucucaaugucgc

SEQ ID NO: 67342 - RNA, 23 nt, Artificial Sequence
  Chemically synthesized
gucaacucagucucaaugucgcu

SEQ ID NO: 67343 - RNA, 23 nt, Artificial Sequence
  Chemically synthesized
ucaacucagucucaaugucgcug

SEQ ID NO: 67344 - RNA, 23 nt, Artificial Sequence
  Chemically synthesized
caacucagucucaaugucgcugc

SEQ ID NO: 67345 - RNA, 23 nt, Artificial Sequence
  Chemically synthesized
aacucagucucaaugucgcugcg

SEQ ID NO: 67346 - RNA, 23 nt, Artificial Sequence
  Chemically synthesized
ugggagagggacagaucauaucc

SEQ ID NO: 67347 - RNA, 23 nt, Artificial Sequence
  Chemically synthesized
gggagagggacagaucauauccu

SEQ ID NO: 67348 - RNA, 23 nt, Artificial Sequence
  Chemically synthesized
ggagagggacagaucauauccug

SEQ ID NO: 67349 - RNA, 23 nt, Artificial Sequence
  Chemically synthesized
gagagggacagaucauauccugg

SEQ ID NO: 67350 - RNA, 23 nt, Artificial Sequence
  Chemically synthesized
agagggacagaucauauccuggc

SEQ ID NO: 67351 - RNA, 23 nt, Artificial Sequence
  Chemically synthesized
guuguuggagaucucgaugaagg

SEQ ID NO: 67352 - RNA, 23 nt, Artificial Sequence
  Chemically synthesized
uuguuggagaucucgaugaagga

SEQ ID NO: 67353 - RNA, 23 nt, Artificial Sequence
  Chemically synthesized
uguuggagaucucgaugaaggau

SEQ ID NO: 67354 - RNA, 23 nt, Artificial Sequence
  Chemically synthesized
guuggagaucucgaugaaggauc

SEQ ID NO: 67355 - RNA, 23 nt, Artificial Sequence
  Chemically synthesized
uuggagaucucgaugaaggaucu

SEQ ID NO: 67356 - RNA, 23 nt, Artificial Sequence
  Chemically synthesized
gagcuucucagacacgaugcucu

SEQ ID NO: 67357 - RNA, 23 nt, Artificial Sequence
  Chemically synthesized
agcuucucagacacgaugcucug

SEQ ID NO: 67358 - RNA, 23 nt, Artificial Sequence
  Chemically synthesized
gcuucucagacacgaugcucugg

SEQ ID NO: 67359 - RNA, 23 nt, Artificial Sequence
  Chemically synthesized
cuucucagacacgaugcucuggc

SEQ ID NO: 67360 - RNA, 23 nt, Artificial Sequence
  Chemically synthesized
uucucagacacgaugcucuggcg

SEQ ID NO: 67361 - RNA, 23 nt, Artificial Sequence
  Chemically synthesized
cuuuaugccagacaaagacauug

SEQ ID NO: 67362 - RNA, 23 nt, Artificial Sequence
  Chemically synthesized
aggaaugcgaggaaccauagaug

SEQ ID NO: 67363 - RNA, 23 nt, Artificial Sequence
  Chemically synthesized
ggaaugcgaggaaccauagaugg

SEQ ID NO: 67364 - RNA, 23 nt, Artificial Sequence
  Chemically synthesized
gaaugcgaggaaccauagauggc

SEQ ID NO: 67365 - RNA, 23 nt, Artificial Sequence
  Chemically synthesized
aaugcgaggaaccauagauggcg

SEQ ID NO: 67366 - RNA, 23 nt, Artificial Sequence
  Chemically synthesized
augcgaggaaccauagauggcgc

SEQ ID NO: 67367 - RNA, 23 nt, Artificial Sequence
  Chemically synthesized
gaugaaagaacgugcuuaaaacc

SEQ ID NO: 67368 - RNA, 23 nt, Artificial Sequence
  Chemically synthesized
uacuucucacucuagucccuaga

SEQ ID NO: 67369 - RNA, 23 nt, Artificial Sequence
  Chemically synthesized
aaauaggaagaacagaggugagg

SEQ ID NO: 67370 - RNA, 23 nt, Artificial Sequence
  Chemically synthesized
aauaggaagaacagaggugaggu

SEQ ID NO: 67371 - RNA, 23 nt, Artificial Sequence
  Chemically synthesized
gcgcaggccugugaauagacucc

SEQ ID NO: 67372 - RNA, 23 nt, Artificial Sequence
  Chemically synthesized
cgcaggccugugaauagacuccg

SEQ ID NO: 67373 - RNA, 23 nt, Artificial Sequence
  Chemically synthesized
gcaggccugugaauagacuccgg

SEQ ID NO: 67374 - RNA, 23 nt, Artificial Sequence
  Chemically synthesized
caggccugugaauagacuccggu

SEQ ID NO: 67375 - RNA, 23 nt, Artificial Sequence
  Chemically synthesized
aggccugugaauagacuccgguu

SEQ ID NO: 67376 - RNA, 23 nt, Artificial Sequence
  Chemically synthesized
ugcccugacuuguacucaaagcc

SEQ ID NO: 67377 - RNA, 23 nt, Artificial Sequence
  Chemically synthesized
gcccugacuuguacucaaagccc

SEQ ID NO: 67378 - RNA, 23 nt, Artificial Sequence
  Chemically synthesized
cccugacuuguacucaaagcccu

SEQ ID NO: 67379 - RNA, 23 nt, Artificial Sequence
  Chemically synthesized
ccugacuuguacucaaagcccug

SEQ ID NO: 67380 - RNA, 23 nt, Artificial Sequence
  Chemically synthesized
cugacuuguacucaaagcccugg

SEQ ID NO: 67381 - RNA, 23 nt, Artificial Sequence
  Chemically synthesized
gaggcaaagacauacaugauggc

SEQ ID NO: 67382 - RNA, 23 nt, Artificial Sequence
  Chemically synthesized
gcacauggugagcaagauguagg

SEQ ID NO: 67383 - RNA, 23 nt, Artificial Sequence
  Chemically synthesized
cacauggugagcaagauguagga

SEQ ID NO: 67384 - RNA, 23 nt, Artificial Sequence
  Chemically synthesized
acauggugagcaagauguaggag

SEQ ID NO: 67385 - RNA, 23 nt, Artificial Sequence
  Chemically synthesized
cauggugagcaagauguaggaga

SEQ ID NO: 67386 - RNA, 23 nt, Artificial Sequence
  Chemically synthesized
auggugagcaagauguaggagaa

SEQ ID NO: 67387 - RNA, 23 nt, Artificial Sequence
  Chemically synthesized
gcgcuugaacuguugcaccgucu

SEQ ID NO: 67388 - RNA, 23 nt, Artificial Sequence
  Chemically synthesized
cgcuugaacuguugcaccgucug

SEQ ID NO: 67389 - RNA, 23 nt, Artificial Sequence
  Chemically synthesized
gcuugaacuguugcaccgucugg

SEQ ID NO: 67390 - RNA, 23 nt, Artificial Sequence
  Chemically synthesized
cuugaacuguugcaccgucuggu

SEQ ID NO: 67391 - RNA, 23 nt, Artificial Sequence
  Chemically synthesized
uugaacuguugcaccgucuggug

SEQ ID NO: 67392 - RNA, 23 nt, Artificial Sequence
  Chemically synthesized
gaacauggacuccacaaacaugu

SEQ ID NO: 67393 - RNA, 23 nt, Artificial Sequence
  Chemically synthesized
aacauggacuccacaaacauguc

SEQ ID NO: 67394 - RNA, 23 nt, Artificial Sequence
  Chemically synthesized
acauggacuccacaaacaugucc

SEQ ID NO: 67395 - RNA, 23 nt, Artificial Sequence
  Chemically synthesized
cauggacuccacaaacauguccu

SEQ ID NO: 67396 - RNA, 23 nt, Artificial Sequence
  Chemically synthesized
auggacuccacaaacauguccug

SEQ ID NO: 67397 - RNA, 23 nt, Artificial Sequence
  Chemically synthesized
gagccucuugaaauuucucaucc

SEQ ID NO: 67398 - RNA, 23 nt, Artificial Sequence
  Chemically synthesized
agccucuugaaauuucucauccg

SEQ ID NO: 67399 - RNA, 23 nt, Artificial Sequence
  Chemically synthesized
gccucuugaaauuucucauccgg

SEQ ID NO: 67400 - RNA, 23 nt, Artificial Sequence
  Chemically synthesized
ccucuugaaauuucucauccgga

SEQ ID NO: 67401 - RNA, 23 nt, Artificial Sequence
  Chemically synthesized
cucuugaaauuucucauccggag

SEQ ID NO: 67402 - RNA, 23 nt, Artificial Sequence
  Chemically synthesized
ucuccuuuaugccagacaaagac

SEQ ID NO: 67403 - RNA, 23 nt, Artificial Sequence
  Chemically synthesized
cuccuuuaugccagacaaagaca

SEQ ID NO: 67404 - RNA, 23 nt, Artificial Sequence
  Chemically synthesized
uccuuuaugccagacaaagacau

SEQ ID NO: 67405 - RNA, 23 nt, Artificial Sequence
  Chemically synthesized
ccuuuaugccagacaaagacauu

SEQ ID NO: 67406 - RNA, 23 nt, Artificial Sequence
  Chemically synthesized
ccugguguucucaaaccaguagc

SEQ ID NO: 67407 - RNA, 23 nt, Artificial Sequence
  Chemically synthesized
cugguguucucaaaccaguagcg

SEQ ID NO: 67408 - RNA, 23 nt, Artificial Sequence
  Chemically synthesized
ugguguucucaaaccaguagcgg

SEQ ID NO: 67409 - RNA, 23 nt, Artificial Sequence
  Chemically synthesized
gguguucucaaaccaguagcggu

SEQ ID NO: 67410 - RNA, 23 nt, Artificial Sequence
  Chemically synthesized
guguucucaaaccaguagcgguc

SEQ ID NO: 67411 - RNA, 23 nt, Artificial Sequence
  Chemically synthesized
cuccaguacagugucauugcucc

SEQ ID NO: 67412 - RNA, 23 nt, Artificial Sequence
  Chemically synthesized
uccaguacagugucauugcuccg

SEQ ID NO: 67413 - RNA, 23 nt, Artificial Sequence
  Chemically synthesized
ccacaucuucagcacuuuguagg

SEQ ID NO: 67414 - RNA, 23 nt, Artificial Sequence
  Chemically synthesized
cacaucuucagcacuuuguaggc

SEQ ID NO: 67415 - RNA, 23 nt, Artificial Sequence
  Chemically synthesized
acaucuucagcacuuuguaggcu

SEQ ID NO: 67416 - RNA, 23 nt, Artificial Sequence
  Chemically synthesized
caucuucagcacuuuguaggcuu

SEQ ID NO: 67417 - RNA, 23 nt, Artificial Sequence
  Chemically synthesized
aucuucagcacuuuguaggcuug

SEQ ID NO: 67418 - RNA, 23 nt, Artificial Sequence
  Chemically synthesized
caggaaugcgaggaaccauagau

SEQ ID NO: 67419 - RNA, 23 nt, Artificial Sequence
  Chemically synthesized
auaggaagaacagaggugaggug

SEQ ID NO: 67420 - RNA, 23 nt, Artificial Sequence
  Chemically synthesized
gggccuagaaguucucauaaugg

SEQ ID NO: 67421 - RNA, 23 nt, Artificial Sequence
  Chemically synthesized
ucaaacuuaugccacuccuggug

SEQ ID NO: 67422 - RNA, 23 nt, Artificial Sequence
  Chemically synthesized
ggaggcaaagacauacaugaugg

SEQ ID NO: 67423 - RNA, 23 nt, Artificial Sequence
  Chemically synthesized
aagacauacaugauggccaggau

SEQ ID NO: 67424 - RNA, 23 nt, Artificial Sequence
  Chemically synthesized
ccaggaaagaggcaagagaggac

SEQ ID NO: 67425 - RNA, 23 nt, Artificial Sequence
  Chemically synthesized
ucucaaugaagcgcuugaacugu

SEQ ID NO: 67426 - RNA, 23 nt, Artificial Sequence
  Chemically synthesized
cucaaugaagcgcuugaacuguu

SEQ ID NO: 67427 - RNA, 23 nt, Artificial Sequence
  Chemically synthesized
ucaaugaagcgcuugaacuguug

SEQ ID NO: 67428 - RNA, 23 nt, Artificial Sequence
  Chemically synthesized
caaugaagcgcuugaacuguugc

SEQ ID NO: 67429 - RNA, 23 nt, Artificial Sequence
  Chemically synthesized
aaugaagcgcuugaacuguugca

SEQ ID NO: 67430 - RNA, 23 nt, Artificial Sequence
  Chemically synthesized
ggccauucccaucaaagucguac

SEQ ID NO: 67431 - RNA, 23 nt, Artificial Sequence
  Chemically synthesized
gccauucccaucaaagucguaca

SEQ ID NO: 67432 - RNA, 23 nt, Artificial Sequence
  Chemically synthesized
ccauucccaucaaagucguacau

SEQ ID NO: 67433 - RNA, 23 nt, Artificial Sequence
  Chemically synthesized
cauucccaucaaagucguacaug

SEQ ID NO: 67434 - RNA, 23 nt, Artificial Sequence
  Chemically synthesized
auucccaucaaagucguacaugc

SEQ ID NO: 67435 - RNA, 23 nt, Artificial Sequence
  Chemically synthesized
caaguuaaacagcagcaccaggu

SEQ ID NO: 67436 - RNA, 23 nt, Artificial Sequence
  Chemically synthesized
aaguuaaacagcagcaccagguc

SEQ ID NO: 67437 - RNA, 23 nt, Artificial Sequence
  Chemically synthesized
aguuaaacagcagcaccagguca

SEQ ID NO: 67438 - RNA, 23 nt, Artificial Sequence
  Chemically synthesized
guuaaacagcagcaccaggucau

SEQ ID NO: 67439 - RNA, 23 nt, Artificial Sequence
  Chemically synthesized
uuaaacagcagcaccaggucaua

SEQ ID NO: 67440 - RNA, 23 nt, Artificial Sequence
  Chemically synthesized
ggccuugccauuccaaagcuucc

SEQ ID NO: 67441 - RNA, 23 nt, Artificial Sequence
  Chemically synthesized
gccuugccauuccaaagcuucca

SEQ ID NO: 67442 - RNA, 23 nt, Artificial Sequence
  Chemically synthesized
ccuugccauuccaaagcuuccau

SEQ ID NO: 67443 - RNA, 23 nt, Artificial Sequence
  Chemically synthesized
cuugccauuccaaagcuuccaug

SEQ ID NO: 67444 - RNA, 23 nt, Artificial Sequence
  Chemically synthesized
uugccauuccaaagcuuccaugc

SEQ ID NO: 67445 - RNA, 23 nt, Artificial Sequence
  Chemically synthesized
ucuugaaauuucucauccggagc

SEQ ID NO: 67446 - RNA, 23 nt, Artificial Sequence
  Chemically synthesized
cuugaaauuucucauccggagcc

SEQ ID NO: 67447 - RNA, 23 nt, Artificial Sequence
  Chemically synthesized
ccucaaaauagucacgaacaaca

SEQ ID NO: 67448 - RNA, 23 nt, Artificial Sequence
  Chemically synthesized
cucaaaauagucacgaacaacag

SEQ ID NO: 67449 - RNA, 23 nt, Artificial Sequence
  Chemically synthesized
ucaaaauagucacgaacaacaga

SEQ ID NO: 67450 - RNA, 23 nt, Artificial Sequence
  Chemically synthesized
caaaauagucacgaacaacagag

SEQ ID NO: 67451 - RNA, 23 nt, Artificial Sequence
  Chemically synthesized
aaaauagucacgaacaacagagg

SEQ ID NO: 67452 - RNA, 23 nt, Artificial Sequence
  Chemically synthesized
aaauagucacgaacaacagaggg

SEQ ID NO: 67453 - RNA, 23 nt, Artificial Sequence
  Chemically synthesized
aauagucacgaacaacagaggga

SEQ ID NO: 67454 - RNA, 23 nt, Artificial Sequence
  Chemically synthesized
auagucacgaacaacagagggag

SEQ ID NO: 67455 - RNA, 23 nt, Artificial Sequence
  Chemically synthesized
uagucacgaacaacagagggagc

SEQ ID NO: 67456 - RNA, 23 nt, Artificial Sequence
  Chemically synthesized
ugguauuucggauuucuucaauc

SEQ ID NO: 67457 - RNA, 23 nt, Artificial Sequence
  Chemically synthesized
gguauuucggauuucuucaaucu

SEQ ID NO: 67458 - RNA, 23 nt, Artificial Sequence
  Chemically synthesized
guauuucggauuucuucaaucuc

SEQ ID NO: 67459 - RNA, 23 nt, Artificial Sequence
  Chemically synthesized
uauuucggauuucuucaaucucc

SEQ ID NO: 67460 - RNA, 23 nt, Artificial Sequence
  Chemically synthesized
auuucggauuucuucaaucuccu

SEQ ID NO: 67461 - RNA, 23 nt, Artificial Sequence
  Chemically synthesized
ucccguagccgcacaaauuguuc

SEQ ID NO: 67462 - RNA, 23 nt, Artificial Sequence
  Chemically synthesized
cuggcauuucucauguagacgcc

SEQ ID NO: 67463 - RNA, 23 nt, Artificial Sequence
  Chemically synthesized
uggcauuucucauguagacgcca

SEQ ID NO: 67464 - RNA, 23 nt, Artificial Sequence
  Chemically synthesized
ggcauuucucauguagacgccag

SEQ ID NO: 67465 - RNA, 23 nt, Artificial Sequence
  Chemically synthesized
gcauuucucauguagacgccagg

SEQ ID NO: 67466 - RNA, 23 nt, Artificial Sequence
  Chemically synthesized
cauuucucauguagacgccaggg

SEQ ID NO: 67467 - RNA, 23 nt, Artificial Sequence
  Chemically synthesized
auuucucauguagacgccagggg

SEQ ID NO: 67468 - RNA, 23 nt, Artificial Sequence
  Chemically synthesized
uuucucauguagacgccaggggg

SEQ ID NO: 67469 - RNA, 23 nt, Artificial Sequence
  Chemically synthesized
uucucauguagacgccagggggc

SEQ ID NO: 67470 - RNA, 23 nt, Artificial Sequence
  Chemically synthesized
cacgugauagccaaagaagaccc

SEQ ID NO: 67471 - RNA, 23 nt, Artificial Sequence
  Chemically synthesized
acgugauagccaaagaagacccc

SEQ ID NO: 67472 - RNA, 23 nt, Artificial Sequence
  Chemically synthesized
cgugauagccaaagaagaccccc

SEQ ID NO: 67473 - RNA, 23 nt, Artificial Sequence
  Chemically synthesized
gugauagccaaagaagaccccca

SEQ ID NO: 67474 - RNA, 23 nt, Artificial Sequence
  Chemically synthesized
ugauagccaaagaagacccccaa

SEQ ID NO: 67475 - RNA, 23 nt, Artificial Sequence
  Chemically synthesized
agugauuuauuuggaagggagac

SEQ ID NO: 67476 - RNA, 23 nt, Artificial Sequence
  Chemically synthesized
gugauuuauuuggaagggagacu

SEQ ID NO: 67477 - RNA, 23 nt, Artificial Sequence
  Chemically synthesized
ugauuuauuuggaagggagacua

SEQ ID NO: 67478 - RNA, 23 nt, Artificial Sequence
  Chemically synthesized
gauuuauuuggaagggagacuac

SEQ ID NO: 67479 - RNA, 23 nt, Artificial Sequence
  Chemically synthesized
auuuauuuggaagggagacuacu

SEQ ID NO: 67480 - RNA, 23 nt, Artificial Sequence
  Chemically synthesized
ugaggagcauugcauacauaggu

SEQ ID NO: 67481 - RNA, 23 nt, Artificial Sequence
  Chemically synthesized
gaggagcauugcauacauaggua

SEQ ID NO: 67482 - RNA, 23 nt, Artificial Sequence
  Chemically synthesized
aggagcauugcauacauagguau

SEQ ID NO: 67483 - RNA, 23 nt, Artificial Sequence
  Chemically synthesized
ggagcauugcauacauagguauu

SEQ ID NO: 67484 - RNA, 23 nt, Artificial Sequence
  Chemically synthesized
gagcauugcauacauagguauug

SEQ ID NO: 67485 - RNA, 23 nt, Artificial Sequence
  Chemically synthesized
ucucauaauggugggagaaguga

SEQ ID NO: 67486 - RNA, 23 nt, Artificial Sequence
  Chemically synthesized
cucauaauggugggagaagugag

SEQ ID NO: 67487 - RNA, 23 nt, Artificial Sequence
  Chemically synthesized
ucauaauggugggagaagugagu

SEQ ID NO: 67488 - RNA, 23 nt, Artificial Sequence
  Chemically synthesized
cauaauggugggagaagugaguc

SEQ ID NO: 67489 - RNA, 23 nt, Artificial Sequence
  Chemically synthesized
auaauggugggagaagugagucc

SEQ ID NO: 67490 - RNA, 23 nt, Artificial Sequence
  Chemically synthesized
acccaucaaaucgcugcaccucc

SEQ ID NO: 67491 - RNA, 23 nt, Artificial Sequence
  Chemically synthesized
cccaucaaaucgcugcaccuccc

SEQ ID NO: 67492 - RNA, 23 nt, Artificial Sequence
  Chemically synthesized
ccaucaaaucgcugcaccuccca

SEQ ID NO: 67493 - RNA, 23 nt, Artificial Sequence
  Chemically synthesized
caucaaaucgcugcaccucccac

SEQ ID NO: 67494 - RNA, 23 nt, Artificial Sequence
  Chemically synthesized
aucaaaucgcugcaccucccacg

SEQ ID NO: 67495 - RNA, 23 nt, Artificial Sequence
  Chemically synthesized
gaaguagaucuucuuacagaaca

SEQ ID NO: 67496 - RNA, 23 nt, Artificial Sequence
  Chemically synthesized
aaguagaucuucuuacagaacac

SEQ ID NO: 67497 - RNA, 23 nt, Artificial Sequence
  Chemically synthesized
aguagaucuucuuacagaacacu

SEQ ID NO: 67498 - RNA, 23 nt, Artificial Sequence
  Chemically synthesized
guagaucuucuuacagaacacuu

SEQ ID NO: 67499 - RNA, 23 nt, Artificial Sequence
  Chemically synthesized
uagaucuucuuacagaacacuug

SEQ ID NO: 67500 - RNA, 23 nt, Artificial Sequence
  Chemically synthesized
cccccauagaugauugcugggac

SEQ ID NO: 67501 - RNA, 23 nt, Artificial Sequence
  Chemically synthesized
aagcccaugaugaaaauaauagg

SEQ ID NO: 67502 - RNA, 23 nt, Artificial Sequence
  Chemically synthesized
aagauguaggagaacaugaaaga

SEQ ID NO: 67503 - RNA, 23 nt, Artificial Sequence
  Chemically synthesized
agauguaggagaacaugaaagag

SEQ ID NO: 67504 - RNA, 23 nt, Artificial Sequence
  Chemically synthesized
augaagcgcuugaacuguugcac

SEQ ID NO: 67505 - RNA, 23 nt, Artificial Sequence
  Chemically synthesized
ugaagcgcuugaacuguugcacc

SEQ ID NO: 67506 - RNA, 23 nt, Artificial Sequence
  Chemically synthesized
cagcaagggcuggaaugacguua

SEQ ID NO: 67507 - RNA, 23 nt, Artificial Sequence
  Chemically synthesized
agcaagggcuggaaugacguuac

SEQ ID NO: 67508 - RNA, 23 nt, Artificial Sequence
  Chemically synthesized
gcaagggcuggaaugacguuacc

SEQ ID NO: 67509 - RNA, 23 nt, Artificial Sequence
  Chemically synthesized
caagggcuggaaugacguuaccu

SEQ ID NO: 67510 - RNA, 23 nt, Artificial Sequence
  Chemically synthesized
aagggcuggaaugacguuaccuu

SEQ ID NO: 67511 - RNA, 23 nt, Artificial Sequence
  Chemically synthesized
cuccaaguuaaacagcagcacca

SEQ ID NO: 67512 - RNA, 23 nt, Artificial Sequence
  Chemically synthesized
uccaaguuaaacagcagcaccag

SEQ ID NO: 67513 - RNA, 23 nt, Artificial Sequence
  Chemically synthesized
ccaaguuaaacagcagcaccagg

SEQ ID NO: 67514 - RNA, 23 nt, Artificial Sequence
  Chemically synthesized
cuggagccucuugaaauuucuca

SEQ ID NO: 67515 - RNA, 23 nt, Artificial Sequence
  Chemically synthesized
uggagccucuugaaauuucucau

SEQ ID NO: 67516 - RNA, 23 nt, Artificial Sequence
  Chemically synthesized
ggagccucuugaaauuucucauc

SEQ ID NO: 67517 - RNA, 23 nt, Artificial Sequence
  Chemically synthesized
uuauuuggaagggagacuacugg

SEQ ID NO: 67518 - RNA, 23 nt, Artificial Sequence
  Chemically synthesized
uauuuggaagggagacuacugga

SEQ ID NO: 67519 - RNA, 23 nt, Artificial Sequence
  Chemically synthesized
auuuggaagggagacuacuggag

SEQ ID NO: 67520 - RNA, 23 nt, Artificial Sequence
  Chemically synthesized
uuuggaagggagacuacuggagc

SEQ ID NO: 67521 - RNA, 23 nt, Artificial Sequence
  Chemically synthesized
uuggaagggagacuacuggagca

SEQ ID NO: 67522 - RNA, 23 nt, Artificial Sequence
  Chemically synthesized
aguggguuucuguaaauggcuug

SEQ ID NO: 67523 - RNA, 23 nt, Artificial Sequence
  Chemically synthesized
cugguacacgccaucugcauagc

SEQ ID NO: 67524 - RNA, 23 nt, Artificial Sequence
  Chemically synthesized
ugguacacgccaucugcauagcu

SEQ ID NO: 67525 - RNA, 23 nt, Artificial Sequence
  Chemically synthesized
gguacacgccaucugcauagcug

SEQ ID NO: 67526 - RNA, 23 nt, Artificial Sequence
  Chemically synthesized
guacacgccaucugcauagcugg

SEQ ID NO: 67527 - RNA, 23 nt, Artificial Sequence
  Chemically synthesized
uacacgccaucugcauagcuggc

SEQ ID NO: 67528 - RNA, 23 nt, Artificial Sequence
  Chemically synthesized
uuuguuucugaagucuggaagca

SEQ ID NO: 67529 - RNA, 23 nt, Artificial Sequence
  Chemically synthesized
uuguuucugaagucuggaagcag

SEQ ID NO: 67530 - RNA, 23 nt, Artificial Sequence
  Chemically synthesized
agaucuucuuacagaacacuugg

SEQ ID NO: 67531 - RNA, 23 nt, Artificial Sequence
  Chemically synthesized
ucuuacagaacacuuggcagcug

SEQ ID NO: 67532 - RNA, 23 nt, Artificial Sequence
  Chemically synthesized
ugacuuguacucaaagcccuggg

SEQ ID NO: 67533 - RNA, 23 nt, Artificial Sequence
  Chemically synthesized
gcagaagcccaugaugaaaauaa

SEQ ID NO: 67534 - RNA, 23 nt, Artificial Sequence
  Chemically synthesized
cagaagcccaugaugaaaauaau

SEQ ID NO: 67535 - RNA, 23 nt, Artificial Sequence
  Chemically synthesized
agaagcccaugaugaaaauaaua

SEQ ID NO: 67536 - RNA, 23 nt, Artificial Sequence
  Chemically synthesized
gaagcccaugaugaaaauaauag

SEQ ID NO: 67537 - RNA, 23 nt, Artificial Sequence
  Chemically synthesized
ugggaggcaaagacauacaugau

SEQ ID NO: 67538 - RNA, 23 nt, Artificial Sequence
  Chemically synthesized
gggaggcaaagacauacaugaug

SEQ ID NO: 67539 - RNA, 23 nt, Artificial Sequence
  Chemically synthesized
agggcuggaaugacguuaccuuc

SEQ ID NO: 67540 - RNA, 23 nt, Artificial Sequence
  Chemically synthesized
augacguuaccuucuugccaaac

SEQ ID NO: 67541 - RNA, 23 nt, Artificial Sequence
  Chemically synthesized
ugaggccauucccaucaaagucg

SEQ ID NO: 67542 - RNA, 23 nt, Artificial Sequence
  Chemically synthesized
gaggccauucccaucaaagucgu

SEQ ID NO: 67543 - RNA, 23 nt, Artificial Sequence
  Chemically synthesized
aggccauucccaucaaagucgua

SEQ ID NO: 67544 - RNA, 23 nt, Artificial Sequence
  Chemically synthesized
auaaggcgagacuuuuccucagg

SEQ ID NO: 67545 - RNA, 23 nt, Artificial Sequence
  Chemically synthesized
gccauugccauccuugucagcca

SEQ ID NO: 67546 - RNA, 23 nt, Artificial Sequence
  Chemically synthesized
ccauugccauccuugucagccag

SEQ ID NO: 67547 - RNA, 23 nt, Artificial Sequence
  Chemically synthesized
cauugccauccuugucagccaga

SEQ ID NO: 67548 - RNA, 23 nt, Artificial Sequence
  Chemically synthesized
auugccauccuugucagccagag

SEQ ID NO: 67549 - RNA, 23 nt, Artificial Sequence
  Chemically synthesized
uugccauccuugucagccagaga

SEQ ID NO: 67550 - RNA, 23 nt, Artificial Sequence
  Chemically synthesized
agagaacauggacuccacaaaca

SEQ ID NO: 67551 - RNA, 23 nt, Artificial Sequence
  Chemically synthesized
gagaacauggacuccacaaacau

SEQ ID NO: 67552 - RNA, 23 nt, Artificial Sequence
  Chemically synthesized
agaacauggacuccacaaacaug

SEQ ID NO: 67553 - RNA, 23 nt, Artificial Sequence
  Chemically synthesized
gcucuuccuccaaguuaaacagc

SEQ ID NO: 67554 - RNA, 23 nt, Artificial Sequence
  Chemically synthesized
cucuuccuccaaguuaaacagca

SEQ ID NO: 67555 - RNA, 23 nt, Artificial Sequence
  Chemically synthesized
ucuuccuccaaguuaaacagcag

SEQ ID NO: 67556 - RNA, 23 nt, Artificial Sequence
  Chemically synthesized
cuuccuccaaguuaaacagcagc

SEQ ID NO: 67557 - RNA, 23 nt, Artificial Sequence
  Chemically synthesized
uuccuccaaguuaaacagcagca

SEQ ID NO: 67558 - RNA, 23 nt, Artificial Sequence
  Chemically synthesized
ccacugcccucaaaauagucacg

SEQ ID NO: 67559 - RNA, 23 nt, Artificial Sequence
  Chemically synthesized
cacugcccucaaaauagucacga

SEQ ID NO: 67560 - RNA, 23 nt, Artificial Sequence
  Chemically synthesized
acugcccucaaaauagucacgaa

SEQ ID NO: 67561 - RNA, 23 nt, Artificial Sequence
  Chemically synthesized
cugcccucaaaauagucacgaac

SEQ ID NO: 67562 - RNA, 23 nt, Artificial Sequence
  Chemically synthesized
ugcccucaaaauagucacgaaca

SEQ ID NO: 67563 - RNA, 23 nt, Artificial Sequence
  Chemically synthesized
acaaagacauugggcugcagagc

SEQ ID NO: 67564 - RNA, 23 nt, Artificial Sequence
  Chemically synthesized
gcgggaaaacuucaguggcccag

SEQ ID NO: 67565 - RNA, 23 nt, Artificial Sequence
  Chemically synthesized
cgggaaaacuucaguggcccagg

SEQ ID NO: 67566 - RNA, 23 nt, Artificial Sequence
  Chemically synthesized
gggaaaacuucaguggcccaggc

SEQ ID NO: 67567 - RNA, 23 nt, Artificial Sequence
  Chemically synthesized
ggaaaacuucaguggcccaggcc

SEQ ID NO: 67568 - RNA, 23 nt, Artificial Sequence
  Chemically synthesized
gaaaacuucaguggcccaggcca

SEQ ID NO: 67569 - RNA, 23 nt, Artificial Sequence
  Chemically synthesized
aaaacuucaguggcccaggccag

SEQ ID NO: 67570 - RNA, 23 nt, Artificial Sequence
  Chemically synthesized
gcacgugauagccaaagaagacc

SEQ ID NO: 67571 - RNA, 23 nt, Artificial Sequence
  Chemically synthesized
gccgaguggguuucuguaaaugg

SEQ ID NO: 67572 - RNA, 23 nt, Artificial Sequence
  Chemically synthesized
ccgaguggguuucuguaaauggc

SEQ ID NO: 67573 - RNA, 23 nt, Artificial Sequence
  Chemically synthesized
cgaguggguuucuguaaauggcu

SEQ ID NO: 67574 - RNA, 23 nt, Artificial Sequence
  Chemically synthesized
gaguggguuucuguaaauggcuu

SEQ ID NO: 67575 - RNA, 23 nt, Artificial Sequence
  Chemically synthesized
ccacugcauccuuacacucaccg

SEQ ID NO: 67576 - RNA, 23 nt, Artificial Sequence
  Chemically synthesized
cacugcauccuuacacucaccgc

SEQ ID NO: 67577 - RNA, 23 nt, Artificial Sequence
  Chemically synthesized
acugcauccuuacacucaccgcc

SEQ ID NO: 67578 - RNA, 23 nt, Artificial Sequence
  Chemically synthesized
cugcauccuuacacucaccgccc

SEQ ID NO: 67579 - RNA, 23 nt, Artificial Sequence
  Chemically synthesized
ugcauccuuacacucaccgcccc

SEQ ID NO: 67580 - RNA, 23 nt, Artificial Sequence
  Chemically synthesized
cacauaguacuugucaggucagc

SEQ ID NO: 67581 - RNA, 23 nt, Artificial Sequence
  Chemically synthesized
acauaguacuugucaggucagcu

SEQ ID NO: 67582 - RNA, 23 nt, Artificial Sequence
  Chemically synthesized
cauaguacuugucaggucagcuu

SEQ ID NO: 67583 - RNA, 23 nt, Artificial Sequence
  Chemically synthesized
auaguacuugucaggucagcuug

SEQ ID NO: 67584 - RNA, 23 nt, Artificial Sequence
  Chemically synthesized
uaguacuugucaggucagcuugu

SEQ ID NO: 67585 - RNA, 23 nt, Artificial Sequence
  Chemically synthesized
uaauggugggagaagugaguccg

SEQ ID NO: 67586 - RNA, 23 nt, Artificial Sequence
  Chemically synthesized
aauggugggagaagugaguccgg

SEQ ID NO: 67587 - RNA, 23 nt, Artificial Sequence
  Chemically synthesized
uguuguaccacccaucaaaucgc

SEQ ID NO: 67588 - RNA, 23 nt, Artificial Sequence
  Chemically synthesized
guuguaccacccaucaaaucgcu

SEQ ID NO: 67589 - RNA, 23 nt, Artificial Sequence
  Chemically synthesized
uuguaccacccaucaaaucgcug

SEQ ID NO: 67590 - RNA, 23 nt, Artificial Sequence
  Chemically synthesized
uguaccacccaucaaaucgcugc

SEQ ID NO: 67591 - RNA, 23 nt, Artificial Sequence
  Chemically synthesized
guaccacccaucaaaucgcugca

SEQ ID NO: 67592 - RNA, 23 nt, Artificial Sequence
  Chemically synthesized
aagcuaccauggaugaugagcag

SEQ ID NO: 67593 - RNA, 23 nt, Artificial Sequence
  Chemically synthesized
agcuaccauggaugaugagcagg

SEQ ID NO: 67594 - RNA, 23 nt, Artificial Sequence
  Chemically synthesized
gcuaccauggaugaugagcagga

SEQ ID NO: 67595 - RNA, 23 nt, Artificial Sequence
  Chemically synthesized
cuaccauggaugaugagcaggac

SEQ ID NO: 67596 - RNA, 23 nt, Artificial Sequence
  Chemically synthesized
uaccauggaugaugagcaggaca

SEQ ID NO: 67597 - RNA, 23 nt, Artificial Sequence
  Chemically synthesized
gacauagagcaggauguagaggu

SEQ ID NO: 67598 - RNA, 23 nt, Artificial Sequence
  Chemically synthesized
acauagagcaggauguagaggug

SEQ ID NO: 67599 - RNA, 23 nt, Artificial Sequence
  Chemically synthesized
cauagagcaggauguagaggugg

SEQ ID NO: 67600 - RNA, 23 nt, Artificial Sequence
  Chemically synthesized
auagagcaggauguagagguggu

SEQ ID NO: 67601 - RNA, 23 nt, Artificial Sequence
  Chemically synthesized
uagagcaggauguagagguggug

SEQ ID NO: 67602 - RNA, 23 nt, Artificial Sequence
  Chemically synthesized
uggugagcaagauguaggagaac

SEQ ID NO: 67603 - RNA, 23 nt, Artificial Sequence
  Chemically synthesized
guaguucucaaugaagcgcuuga

SEQ ID NO: 67604 - RNA, 23 nt, Artificial Sequence
  Chemically synthesized
uaguucucaaugaagcgcuugaa

SEQ ID NO: 67605 - RNA, 23 nt, Artificial Sequence
  Chemically synthesized
aguucucaaugaagcgcuugaac

SEQ ID NO: 67606 - RNA, 23 nt, Artificial Sequence
  Chemically synthesized
guucucaaugaagcgcuugaacu

SEQ ID NO: 67607 - RNA, 23 nt, Artificial Sequence
  Chemically synthesized
uucucaaugaagcgcuugaacug

SEQ ID NO: 67608 - RNA, 23 nt, Artificial Sequence
  Chemically synthesized
gaagcgcuugaacuguugcaccg

SEQ ID NO: 67609 - RNA, 23 nt, Artificial Sequence
  Chemically synthesized
gugucaacucagucucaaugucg

SEQ ID NO: 67610 - RNA, 23 nt, Artificial Sequence
  Chemically synthesized
gaagugaaaaucuucccauguca

SEQ ID NO: 67611 - RNA, 23 nt, Artificial Sequence
  Chemically synthesized
aagugaaaaucuucccaugucag

SEQ ID NO: 67612 - RNA, 23 nt, Artificial Sequence
  Chemically synthesized
agugaaaaucuucccaugucagu

SEQ ID NO: 67613 - RNA, 23 nt, Artificial Sequence
  Chemically synthesized
gugaaaaucuucccaugucaguu

SEQ ID NO: 67614 - RNA, 23 nt, Artificial Sequence
  Chemically synthesized
ugaaaaucuucccaugucaguuc

SEQ ID NO: 67615 - RNA, 23 nt, Artificial Sequence
  Chemically synthesized
gaugaacucauccuuggaaauga

SEQ ID NO: 67616 - RNA, 23 nt, Artificial Sequence
  Chemically synthesized
augaacucauccuuggaaaugag

SEQ ID NO: 67617 - RNA, 23 nt, Artificial Sequence
  Chemically synthesized
ugaacucauccuuggaaaugagg

SEQ ID NO: 67618 - RNA, 23 nt, Artificial Sequence
  Chemically synthesized
gaacucauccuuggaaaugaggc

SEQ ID NO: 67619 - RNA, 23 nt, Artificial Sequence
  Chemically synthesized
aacucauccuuggaaaugaggcc

SEQ ID NO: 67620 - RNA, 23 nt, Artificial Sequence
  Chemically synthesized
ggagagccuuucaugaagaccac

SEQ ID NO: 67621 - RNA, 23 nt, Artificial Sequence
  Chemically synthesized
gagagccuuucaugaagaccacc

SEQ ID NO: 67622 - RNA, 23 nt, Artificial Sequence
  Chemically synthesized
agagccuuucaugaagaccacca

SEQ ID NO: 67623 - RNA, 23 nt, Artificial Sequence
  Chemically synthesized
gagccuuucaugaagaccaccag

SEQ ID NO: 67624 - RNA, 23 nt, Artificial Sequence
  Chemically synthesized
agccuuucaugaagaccaccagg

SEQ ID NO: 67625 - RNA, 23 nt, Artificial Sequence
  Chemically synthesized
gccuuucaugaagaccaccagga

SEQ ID NO: 67626 - RNA, 23 nt, Artificial Sequence
  Chemically synthesized
ccuuucaugaagaccaccaggau

SEQ ID NO: 67627 - RNA, 23 nt, Artificial Sequence
  Chemically synthesized
cuuucaugaagaccaccaggaug

SEQ ID NO: 67628 - RNA, 23 nt, Artificial Sequence
  Chemically synthesized
cgcucuuccuccaaguuaaacag

SEQ ID NO: 67629 - RNA, 23 nt, Artificial Sequence
  Chemically synthesized
ugccauuccaaagcuuccaugcc

SEQ ID NO: 67630 - RNA, 23 nt, Artificial Sequence
  Chemically synthesized
auccacugcccucaaaauaguca

SEQ ID NO: 67631 - RNA, 23 nt, Artificial Sequence
  Chemically synthesized
uccacugcccucaaaauagucac

SEQ ID NO: 67632 - RNA, 23 nt, Artificial Sequence
  Chemically synthesized
agaaaucccgcacaucuucaacc

SEQ ID NO: 67633 - RNA, 23 nt, Artificial Sequence
  Chemically synthesized
gaaaucccgcacaucuucaacca

SEQ ID NO: 67634 - RNA, 23 nt, Artificial Sequence
  Chemically synthesized
aaaucccgcacaucuucaaccaa

SEQ ID NO: 67635 - RNA, 23 nt, Artificial Sequence
  Chemically synthesized
aaucccgcacaucuucaaccaac

SEQ ID NO: 67636 - RNA, 23 nt, Artificial Sequence
  Chemically synthesized
aucccgcacaucuucaaccaaca

SEQ ID NO: 67637 - RNA, 23 nt, Artificial Sequence
  Chemically synthesized
agcgauguucugguagguggcga

SEQ ID NO: 67638 - RNA, 23 nt, Artificial Sequence
  Chemically synthesized
gcgauguucugguagguggcgau

SEQ ID NO: 67639 - RNA, 23 nt, Artificial Sequence
  Chemically synthesized
cgauguucugguagguggcgaug

SEQ ID NO: 67640 - RNA, 23 nt, Artificial Sequence
  Chemically synthesized
gauguucugguagguggcgauga

SEQ ID NO: 67641 - RNA, 23 nt, Artificial Sequence
  Chemically synthesized
auguucugguagguggcgaugac

SEQ ID NO: 67642 - RNA, 23 nt, Artificial Sequence
  Chemically synthesized
ccccaacacugugcgguuucuca

SEQ ID NO: 67643 - RNA, 23 nt, Artificial Sequence
  Chemically synthesized
cccaacacugugcgguuucucag

SEQ ID NO: 67644 - RNA, 23 nt, Artificial Sequence
  Chemically synthesized
ccaacacugugcgguuucucagg

SEQ ID NO: 67645 - RNA, 23 nt, Artificial Sequence
  Chemically synthesized
caacacugugcgguuucucaggg

SEQ ID NO: 67646 - RNA, 23 nt, Artificial Sequence
  Chemically synthesized
aacacugugcgguuucucaggga

SEQ ID NO: 67647 - RNA, 23 nt, Artificial Sequence
  Chemically synthesized
ccagaagaggaggagguauggga

SEQ ID NO: 67648 - RNA, 23 nt, Artificial Sequence
  Chemically synthesized
cagaagaggaggagguaugggag

SEQ ID NO: 67649 - RNA, 23 nt, Artificial Sequence
  Chemically synthesized
agaagaggaggagguaugggagu

SEQ ID NO: 67650 - RNA, 23 nt, Artificial Sequence
  Chemically synthesized
gaagaggaggagguaugggagua

SEQ ID NO: 67651 - RNA, 23 nt, Artificial Sequence
  Chemically synthesized
aagaggaggagguaugggaguag

SEQ ID NO: 67652 - RNA, 23 nt, Artificial Sequence
  Chemically synthesized
acacacauacagacaugcacaca

SEQ ID NO: 67653 - RNA, 23 nt, Artificial Sequence
  Chemically synthesized
cacacauacagacaugcacacac

SEQ ID NO: 67654 - RNA, 23 nt, Artificial Sequence
  Chemically synthesized
auggugacugacuauggccaccu

SEQ ID NO: 67655 - RNA, 23 nt, Artificial Sequence
  Chemically synthesized
uggugacugacuauggccaccug

SEQ ID NO: 67656 - RNA, 23 nt, Artificial Sequence
  Chemically synthesized
ggugacugacuauggccaccugg

SEQ ID NO: 67657 - RNA, 23 nt, Artificial Sequence
  Chemically synthesized
gugacugacuauggccaccugga

SEQ ID NO: 67658 - RNA, 23 nt, Artificial Sequence
  Chemically synthesized
ugacugacuauggccaccuggaa

SEQ ID NO: 67659 - RNA, 23 nt, Artificial Sequence
  Chemically synthesized
auggugggagaagugaguccggu

SEQ ID NO: 67660 - RNA, 23 nt, Artificial Sequence
  Chemically synthesized
uuguuguaccacccaucaaaucg

SEQ ID NO: 67661 - RNA, 23 nt, Artificial Sequence
  Chemically synthesized
uaccacccaucaaaucgcugcac

SEQ ID NO: 67662 - RNA, 23 nt, Artificial Sequence
  Chemically synthesized
ggccugugaauagacuccgguuc

SEQ ID NO: 67663 - RNA, 23 nt, Artificial Sequence
  Chemically synthesized
gccugugaauagacuccgguuca

SEQ ID NO: 67664 - RNA, 23 nt, Artificial Sequence
  Chemically synthesized
ccugugaauagacuccgguucag

SEQ ID NO: 67665 - RNA, 23 nt, Artificial Sequence
  Chemically synthesized
cugugaauagacuccgguucaga

SEQ ID NO: 67666 - RNA, 23 nt, Artificial Sequence
  Chemically synthesized
ugugaauagacuccgguucagaa

SEQ ID NO: 67667 - RNA, 23 nt, Artificial Sequence
  Chemically synthesized
uguacagcauagugguccugagg

SEQ ID NO: 67668 - RNA, 23 nt, Artificial Sequence
  Chemically synthesized
guacagcauagugguccugaggu

SEQ ID NO: 67669 - RNA, 23 nt, Artificial Sequence
  Chemically synthesized
ccccaaccagaaguguccaugcu

SEQ ID NO: 67670 - RNA, 23 nt, Artificial Sequence
  Chemically synthesized
cccaaccagaaguguccaugcua

SEQ ID NO: 67671 - RNA, 23 nt, Artificial Sequence
  Chemically synthesized
ccaaccagaaguguccaugcuag

SEQ ID NO: 67672 - RNA, 23 nt, Artificial Sequence
  Chemically synthesized
caaccagaaguguccaugcuaga

SEQ ID NO: 67673 - RNA, 23 nt, Artificial Sequence
  Chemically synthesized
aaccagaaguguccaugcuagag

SEQ ID NO: 67674 - RNA, 23 nt, Artificial Sequence
  Chemically synthesized
ggcaaagcuaccauggaugauga

SEQ ID NO: 67675 - RNA, 23 nt, Artificial Sequence
  Chemically synthesized
gcaaagcuaccauggaugaugag

SEQ ID NO: 67676 - RNA, 23 nt, Artificial Sequence
  Chemically synthesized
caaagcuaccauggaugaugagc

SEQ ID NO: 67677 - RNA, 23 nt, Artificial Sequence
  Chemically synthesized
aaagcuaccauggaugaugagca

SEQ ID NO: 67678 - RNA, 23 nt, Artificial Sequence
  Chemically synthesized
cacuguguaagacugugaggacg

SEQ ID NO: 67679 - RNA, 23 nt, Artificial Sequence
  Chemically synthesized
acuguguaagacugugaggacga

SEQ ID NO: 67680 - RNA, 23 nt, Artificial Sequence
  Chemically synthesized
cuguguaagacugugaggacgau

SEQ ID NO: 67681 - RNA, 23 nt, Artificial Sequence
  Chemically synthesized
uguguaagacugugaggacgaug

SEQ ID NO: 67682 - RNA, 23 nt, Artificial Sequence
  Chemically synthesized
gcuggaaugacguuaccuucuug

SEQ ID NO: 67683 - RNA, 23 nt, Artificial Sequence
  Chemically synthesized
caugaagugaaaaucuucccaug

SEQ ID NO: 67684 - RNA, 23 nt, Artificial Sequence
  Chemically synthesized
augaagugaaaaucuucccaugu

SEQ ID NO: 67685 - RNA, 23 nt, Artificial Sequence
  Chemically synthesized
ugaagugaaaaucuucccauguc

SEQ ID NO: 67686 - RNA, 23 nt, Artificial Sequence
  Chemically synthesized
uucccaucaaagucguacaugcg

SEQ ID NO: 67687 - RNA, 23 nt, Artificial Sequence
  Chemically synthesized
ucccaucaaagucguacaugcgg

SEQ ID NO: 67688 - RNA, 23 nt, Artificial Sequence
  Chemically synthesized
cccaucaaagucguacaugcgga

SEQ ID NO: 67689 - RNA, 23 nt, Artificial Sequence
  Chemically synthesized
ccaucaaagucguacaugcggaa

SEQ ID NO: 67690 - RNA, 23 nt, Artificial Sequence
  Chemically synthesized
caucaaagucguacaugcggaac

SEQ ID NO: 67691 - RNA, 23 nt, Artificial Sequence
  Chemically synthesized
aggagagccuuucaugaagacca

SEQ ID NO: 67692 - RNA, 23 nt, Artificial Sequence
  Chemically synthesized
auccuugucagccagagagaaca

SEQ ID NO: 67693 - RNA, 23 nt, Artificial Sequence
  Chemically synthesized
uccuugucagccagagagaacau

SEQ ID NO: 67694 - RNA, 23 nt, Artificial Sequence
  Chemically synthesized
ccuugucagccagagagaacaug

SEQ ID NO: 67695 - RNA, 23 nt, Artificial Sequence
  Chemically synthesized
cuugucagccagagagaacaugg

SEQ ID NO: 67696 - RNA, 23 nt, Artificial Sequence
  Chemically synthesized
uugucagccagagagaacaugga

SEQ ID NO: 67697 - RNA, 23 nt, Artificial Sequence
  Chemically synthesized
uggacuccacaaacauguccugg

SEQ ID NO: 67698 - RNA, 23 nt, Artificial Sequence
  Chemically synthesized
ggacuccacaaacauguccuggg

SEQ ID NO: 67699 - RNA, 23 nt, Artificial Sequence
  Chemically synthesized
gacuccacaaacauguccugggg

SEQ ID NO: 67700 - RNA, 23 nt, Artificial Sequence
  Chemically synthesized
acuccacaaacauguccuggggc

SEQ ID NO: 67701 - RNA, 23 nt, Artificial Sequence
  Chemically synthesized
cuccacaaacauguccuggggcu

SEQ ID NO: 67702 - RNA, 23 nt, Artificial Sequence
  Chemically synthesized
ccggagauuuuccaccagcgccu

SEQ ID NO: 67703 - RNA, 23 nt, Artificial Sequence
  Chemically synthesized
cggagauuuuccaccagcgccug

SEQ ID NO: 67704 - RNA, 23 nt, Artificial Sequence
  Chemically synthesized
ggagauuuuccaccagcgccugc

SEQ ID NO: 67705 - RNA, 23 nt, Artificial Sequence
  Chemically synthesized
gagauuuuccaccagcgccugcc

SEQ ID NO: 67706 - RNA, 23 nt, Artificial Sequence
  Chemically synthesized
agauuuuccaccagcgccugccg

SEQ ID NO: 67707 - RNA, 23 nt, Artificial Sequence
  Chemically synthesized
uccuccaaguuaaacagcagcac

SEQ ID NO: 67708 - RNA, 23 nt, Artificial Sequence
  Chemically synthesized
ccuccaaguuaaacagcagcacc

SEQ ID NO: 67709 - RNA, 23 nt, Artificial Sequence
  Chemically synthesized
uaaacagcagcaccaggucauac

SEQ ID NO: 67710 - RNA, 23 nt, Artificial Sequence
  Chemically synthesized
acgguugcuggacaggacgaagu

SEQ ID NO: 67711 - RNA, 23 nt, Artificial Sequence
  Chemically synthesized
cgguugcuggacaggacgaaguu

SEQ ID NO: 67712 - RNA, 23 nt, Artificial Sequence
  Chemically synthesized
gguugcuggacaggacgaaguug

SEQ ID NO: 67713 - RNA, 23 nt, Artificial Sequence
  Chemically synthesized
guugcuggacaggacgaaguuga

SEQ ID NO: 67714 - RNA, 23 nt, Artificial Sequence
  Chemically synthesized
uugcuggacaggacgaaguugac

SEQ ID NO: 67715 - RNA, 23 nt, Artificial Sequence
  Chemically synthesized
uugaaauuucucauccggagccg

SEQ ID NO: 67716 - RNA, 23 nt, Artificial Sequence
  Chemically synthesized
agucacgaacaacagagggagca

SEQ ID NO: 67717 - RNA, 23 nt, Artificial Sequence
  Chemically synthesized
gacgauggugcugaacagagguc

SEQ ID NO: 67718 - RNA, 23 nt, Artificial Sequence
  Chemically synthesized
acgauggugcugaacagaggucc

SEQ ID NO: 67719 - RNA, 23 nt, Artificial Sequence
  Chemically synthesized
cgauggugcugaacagaggucca

SEQ ID NO: 67720 - RNA, 23 nt, Artificial Sequence
  Chemically synthesized
gauggugcugaacagagguccag

SEQ ID NO: 67721 - RNA, 23 nt, Artificial Sequence
  Chemically synthesized
auggugcugaacagagguccagg

SEQ ID NO: 67722 - RNA, 23 nt, Artificial Sequence
  Chemically synthesized
ggccuccaguacagugucauugc

SEQ ID NO: 67723 - RNA, 23 nt, Artificial Sequence
  Chemically synthesized
gccuccaguacagugucauugcu

SEQ ID NO: 67724 - RNA, 23 nt, Artificial Sequence
  Chemically synthesized
ccuccaguacagugucauugcuc

SEQ ID NO: 67725 - RNA, 23 nt, Artificial Sequence
  Chemically synthesized
cauccacaucuucagcacuuugu

SEQ ID NO: 67726 - RNA, 23 nt, Artificial Sequence
  Chemically synthesized
auccacaucuucagcacuuugua

SEQ ID NO: 67727 - RNA, 23 nt, Artificial Sequence
  Chemically synthesized
uccacaucuucagcacuuuguag

SEQ ID NO: 67728 - RNA, 23 nt, Artificial Sequence
  Chemically synthesized
augcucccacugcauccuuacac

SEQ ID NO: 67729 - RNA, 23 nt, Artificial Sequence
  Chemically synthesized
ugcucccacugcauccuuacacu

SEQ ID NO: 67730 - RNA, 23 nt, Artificial Sequence
  Chemically synthesized
gcucccacugcauccuuacacuc

SEQ ID NO: 67731 - RNA, 23 nt, Artificial Sequence
  Chemically synthesized
cucccacugcauccuuacacuca

SEQ ID NO: 67732 - RNA, 23 nt, Artificial Sequence
  Chemically synthesized
ucccacugcauccuuacacucac

SEQ ID NO: 67733 - RNA, 23 nt, Artificial Sequence
  Chemically synthesized
cauacagacaugcacacacauag

SEQ ID NO: 67734 - RNA, 23 nt, Artificial Sequence
  Chemically synthesized
auacagacaugcacacacauagu

SEQ ID NO: 67735 - RNA, 23 nt, Artificial Sequence
  Chemically synthesized
acagacaugcacacacauaguac

SEQ ID NO: 67736 - RNA, 23 nt, Artificial Sequence
  Chemically synthesized
cagacaugcacacacauaguacu

SEQ ID NO: 67737 - RNA, 23 nt, Artificial Sequence
  Chemically synthesized
gacaugcacacacauaguacuug

SEQ ID NO: 67738 - RNA, 23 nt, Artificial Sequence
  Chemically synthesized
acaugcacacacauaguacuugu

SEQ ID NO: 67739 - RNA, 23 nt, Artificial Sequence
  Chemically synthesized
caugcacacacauaguacuuguc

SEQ ID NO: 67740 - RNA, 23 nt, Artificial Sequence
  Chemically synthesized
augcacacacauaguacuuguca

SEQ ID NO: 67741 - RNA, 23 nt, Artificial Sequence
  Chemically synthesized
ugcacacacauaguacuugucag

SEQ ID NO: 67742 - RNA, 23 nt, Artificial Sequence
  Chemically synthesized
gcacacacauaguacuugucagg

SEQ ID NO: 67743 - RNA, 23 nt, Artificial Sequence
  Chemically synthesized
cacacacauaguacuugucaggu

SEQ ID NO: 67744 - RNA, 23 nt, Artificial Sequence
  Chemically synthesized
acacacauaguacuugucagguc

SEQ ID NO: 67745 - RNA, 23 nt, Artificial Sequence
  Chemically synthesized
cacacauaguacuugucagguca

SEQ ID NO: 67746 - RNA, 23 nt, Artificial Sequence
  Chemically synthesized
acacauaguacuugucaggucag

SEQ ID NO: 67747 - RNA, 23 nt, Artificial Sequence
  Chemically synthesized
uaggaagaacagaggugaggugu

SEQ ID NO: 67748 - RNA, 23 nt, Artificial Sequence
  Chemically synthesized
aggaagaacagaggugaggugug

SEQ ID NO: 67749 - RNA, 23 nt, Artificial Sequence
  Chemically synthesized
ggaagaacagaggugaggugugg

SEQ ID NO: 67750 - RNA, 23 nt, Artificial Sequence
  Chemically synthesized
gaagaacagaggugagguguggg

SEQ ID NO: 67751 - RNA, 23 nt, Artificial Sequence
  Chemically synthesized
aagaacagaggugaggugugggc

SEQ ID NO: 67752 - RNA, 23 nt, Artificial Sequence
  Chemically synthesized
ggcucaaaccucugcucaacugg

SEQ ID NO: 67753 - RNA, 23 nt, Artificial Sequence
  Chemically synthesized
gcucaaaccucugcucaacuggg

SEQ ID NO: 67754 - RNA, 23 nt, Artificial Sequence
  Chemically synthesized
cucaaaccucugcucaacugggc

SEQ ID NO: 67755 - RNA, 23 nt, Artificial Sequence
  Chemically synthesized
ucaaaccucugcucaacugggca

SEQ ID NO: 67756 - RNA, 23 nt, Artificial Sequence
  Chemically synthesized
caaaccucugcucaacugggcag

SEQ ID NO: 67757 - RNA, 23 nt, Artificial Sequence
  Chemically synthesized
cuccugcagggaguugaagaagg

SEQ ID NO: 67758 - RNA, 23 nt, Artificial Sequence
  Chemically synthesized
uccugcagggaguugaagaaggg

SEQ ID NO: 67759 - RNA, 23 nt, Artificial Sequence
  Chemically synthesized
ccugcagggaguugaagaagggc

SEQ ID NO: 67760 - RNA, 23 nt, Artificial Sequence
  Chemically synthesized
cugcagggaguugaagaagggcu

SEQ ID NO: 67761 - RNA, 23 nt, Artificial Sequence
  Chemically synthesized
ugcagggaguugaagaagggcuc

SEQ ID NO: 67762 - RNA, 23 nt, Artificial Sequence
  Chemically synthesized
agccagcugggugauguagaugu

SEQ ID NO: 67763 - RNA, 23 nt, Artificial Sequence
  Chemically synthesized
gccagcugggugauguagaugug

SEQ ID NO: 67764 - RNA, 23 nt, Artificial Sequence
  Chemically synthesized
ccagcugggugauguagaugugc

SEQ ID NO: 67765 - RNA, 23 nt, Artificial Sequence
  Chemically synthesized
cagcugggugauguagaugugca

SEQ ID NO: 67766 - RNA, 23 nt, Artificial Sequence
  Chemically synthesized
agcugggugauguagaugugcac

SEQ ID NO: 67767 - RNA, 23 nt, Artificial Sequence
  Chemically synthesized
cucccacuaacacugacaccuca

SEQ ID NO: 67768 - RNA, 23 nt, Artificial Sequence
  Chemically synthesized
ucccacuaacacugacaccucaa

SEQ ID NO: 67769 - RNA, 23 nt, Artificial Sequence
  Chemically synthesized
cccacuaacacugacaccucaaa

SEQ ID NO: 67770 - RNA, 23 nt, Artificial Sequence
  Chemically synthesized
ccacuaacacugacaccucaaac

SEQ ID NO: 67771 - RNA, 23 nt, Artificial Sequence
  Chemically synthesized
cacuaacacugacaccucaaacu

SEQ ID NO: 67772 - RNA, 23 nt, Artificial Sequence
  Chemically synthesized
acccacugcccugacuuguacuc

SEQ ID NO: 67773 - RNA, 23 nt, Artificial Sequence
  Chemically synthesized
cccacugcccugacuuguacuca

SEQ ID NO: 67774 - RNA, 23 nt, Artificial Sequence
  Chemically synthesized
ccacugcccugacuuguacucaa

SEQ ID NO: 67775 - RNA, 23 nt, Artificial Sequence
  Chemically synthesized
cacugcccugacuuguacucaaa

SEQ ID NO: 67776 - RNA, 23 nt, Artificial Sequence
  Chemically synthesized
acugcccugacuuguacucaaag

SEQ ID NO: 67777 - RNA, 23 nt, Artificial Sequence
  Chemically synthesized
agacauacaugauggccaggauc

SEQ ID NO: 67778 - RNA, 23 nt, Artificial Sequence
  Chemically synthesized
gacccaucaucauggaagaggcc

SEQ ID NO: 67779 - RNA, 23 nt, Artificial Sequence
  Chemically synthesized
acccaucaucauggaagaggcca

SEQ ID NO: 67780 - RNA, 23 nt, Artificial Sequence
  Chemically synthesized
cccaucaucauggaagaggccag

SEQ ID NO: 67781 - RNA, 23 nt, Artificial Sequence
  Chemically synthesized
ccaucaucauggaagaggccagg

SEQ ID NO: 67782 - RNA, 23 nt, Artificial Sequence
  Chemically synthesized
caucaucauggaagaggccagga

SEQ ID NO: 67783 - RNA, 23 nt, Artificial Sequence
  Chemically synthesized
acagguacacauucaccacaugg

SEQ ID NO: 67784 - RNA, 23 nt, Artificial Sequence
  Chemically synthesized
cagguacacauucaccacauggc

SEQ ID NO: 67785 - RNA, 23 nt, Artificial Sequence
  Chemically synthesized
agguacacauucaccacauggcc

SEQ ID NO: 67786 - RNA, 23 nt, Artificial Sequence
  Chemically synthesized
gguacacauucaccacauggccc

SEQ ID NO: 67787 - RNA, 23 nt, Artificial Sequence
  Chemically synthesized
guacacauucaccacauggccca

SEQ ID NO: 67788 - RNA, 23 nt, Artificial Sequence
  Chemically synthesized
cacacuguguaagacugugagga

SEQ ID NO: 67789 - RNA, 23 nt, Artificial Sequence
  Chemically synthesized
acacuguguaagacugugaggac

SEQ ID NO: 67790 - RNA, 23 nt, Artificial Sequence
  Chemically synthesized
cagcaugaagugaaaaucuuccc

SEQ ID NO: 67791 - RNA, 23 nt, Artificial Sequence
  Chemically synthesized
agcaugaagugaaaaucuuccca

SEQ ID NO: 67792 - RNA, 23 nt, Artificial Sequence
  Chemically synthesized
gcaugaagugaaaaucuucccau

SEQ ID NO: 67793 - RNA, 23 nt, Artificial Sequence
  Chemically synthesized
aaucuucccaugucaguuccucc

SEQ ID NO: 67794 - RNA, 23 nt, Artificial Sequence
  Chemically synthesized
aucuucccaugucaguuccuccu

SEQ ID NO: 67795 - RNA, 23 nt, Artificial Sequence
  Chemically synthesized
ucuucccaugucaguuccuccuu

SEQ ID NO: 67796 - RNA, 23 nt, Artificial Sequence
  Chemically synthesized
cuucccaugucaguuccuccuug

SEQ ID NO: 67797 - RNA, 23 nt, Artificial Sequence
  Chemically synthesized
uucccaugucaguuccuccuugu

SEQ ID NO: 67798 - RNA, 23 nt, Artificial Sequence
  Chemically synthesized
ggacaggcaguuguuggagaucu

SEQ ID NO: 67799 - RNA, 23 nt, Artificial Sequence
  Chemically synthesized
gacaggcaguuguuggagaucuc

SEQ ID NO: 67800 - RNA, 23 nt, Artificial Sequence
  Chemically synthesized
acaggcaguuguuggagaucucg

SEQ ID NO: 67801 - RNA, 23 nt, Artificial Sequence
  Chemically synthesized
caggcaguuguuggagaucucga

SEQ ID NO: 67802 - RNA, 23 nt, Artificial Sequence
  Chemically synthesized
aggcaguuguuggagaucucgau

SEQ ID NO: 67803 - RNA, 23 nt, Artificial Sequence
  Chemically synthesized
ccgcucuuccuccaaguuaaaca

SEQ ID NO: 67804 - RNA, 23 nt, Artificial Sequence
  Chemically synthesized
aaacagcagcaccaggucauacu

SEQ ID NO: 67805 - RNA, 23 nt, Artificial Sequence
  Chemically synthesized
ugcuggacaggacgaaguugacc

SEQ ID NO: 67806 - RNA, 23 nt, Artificial Sequence
  Chemically synthesized
gcuggacaggacgaaguugaccu

SEQ ID NO: 67807 - RNA, 23 nt, Artificial Sequence
  Chemically synthesized
cuggacaggacgaaguugaccuu

SEQ ID NO: 67808 - RNA, 23 nt, Artificial Sequence
  Chemically synthesized
uggccuccaguacagugucauug

SEQ ID NO: 67809 - RNA, 23 nt, Artificial Sequence
  Chemically synthesized
gcccagaagaggaggagguaugg

SEQ ID NO: 67810 - RNA, 23 nt, Artificial Sequence
  Chemically synthesized
cccagaagaggaggagguauggg

SEQ ID NO: 67811 - RNA, 23 nt, Artificial Sequence
  Chemically synthesized
cccacugcauccuuacacucacc

SEQ ID NO: 67812 - RNA, 23 nt, Artificial Sequence
  Chemically synthesized
gcagggaguugaagaagggcuca

SEQ ID NO: 67813 - RNA, 23 nt, Artificial Sequence
  Chemically synthesized
cagggaguugaagaagggcucaa

SEQ ID NO: 67814 - RNA, 23 nt, Artificial Sequence
  Chemically synthesized
agggaguugaagaagggcucaaa

SEQ ID NO: 67815 - RNA, 23 nt, Artificial Sequence
  Chemically synthesized
gccccaaccagaaguguccaugc

SEQ ID NO: 67816 - RNA, 23 nt, Artificial Sequence
  Chemically synthesized
ggacauagagcaggauguagagg

SEQ ID NO: 67817 - RNA, 23 nt, Artificial Sequence
  Chemically synthesized
caggauguagaggugguggguca

SEQ ID NO: 67818 - RNA, 23 nt, Artificial Sequence
  Chemically synthesized
aggauguagagguggugggucag

SEQ ID NO: 67819 - RNA, 23 nt, Artificial Sequence
  Chemically synthesized
ggauguagagguggugggucagc

SEQ ID NO: 67820 - RNA, 23 nt, Artificial Sequence
  Chemically synthesized
gauguagagguggugggucagcc

SEQ ID NO: 67821 - RNA, 23 nt, Artificial Sequence
  Chemically synthesized
auguagagguggugggucagcca

SEQ ID NO: 67822 - RNA, 23 nt, Artificial Sequence
  Chemically synthesized
gacauacaugauggccaggauca

SEQ ID NO: 67823 - RNA, 23 nt, Artificial Sequence
  Chemically synthesized
acauacaugauggccaggaucag

SEQ ID NO: 67824 - RNA, 23 nt, Artificial Sequence
  Chemically synthesized
ucgcaggaaggugaugagguugc

SEQ ID NO: 67825 - RNA, 23 nt, Artificial Sequence
  Chemically synthesized
cgcaggaaggugaugagguugcg

SEQ ID NO: 67826 - RNA, 23 nt, Artificial Sequence
  Chemically synthesized
gcaggaaggugaugagguugcgg

SEQ ID NO: 67827 - RNA, 23 nt, Artificial Sequence
  Chemically synthesized
caggaaggugaugagguugcggc

SEQ ID NO: 67828 - RNA, 23 nt, Artificial Sequence
  Chemically synthesized
aggaaggugaugagguugcggca

SEQ ID NO: 67829 - RNA, 23 nt, Artificial Sequence
  Chemically synthesized
gcggcacauggugagcaagaugu

SEQ ID NO: 67830 - RNA, 23 nt, Artificial Sequence
  Chemically synthesized
cggcacauggugagcaagaugua

SEQ ID NO: 67831 - RNA, 23 nt, Artificial Sequence
  Chemically synthesized
ggcacauggugagcaagauguag

SEQ ID NO: 67832 - RNA, 23 nt, Artificial Sequence
  Chemically synthesized
gacguuaccuucuugccaaaccu

SEQ ID NO: 67833 - RNA, 23 nt, Artificial Sequence
  Chemically synthesized
acguuaccuucuugccaaaccuc

SEQ ID NO: 67834 - RNA, 23 nt, Artificial Sequence
  Chemically synthesized
cguuaccuucuugccaaaccucc

SEQ ID NO: 67835 - RNA, 23 nt, Artificial Sequence
  Chemically synthesized
guuaccuucuugccaaaccuccg

SEQ ID NO: 67836 - RNA, 23 nt, Artificial Sequence
  Chemically synthesized
uuaccuucuugccaaaccuccgc

SEQ ID NO: 67837 - RNA, 23 nt, Artificial Sequence
  Chemically synthesized
cccaugucaguuccuccuugucc

SEQ ID NO: 67838 - RNA, 23 nt, Artificial Sequence
  Chemically synthesized
ccaugucaguuccuccuuguccu

SEQ ID NO: 67839 - RNA, 23 nt, Artificial Sequence
  Chemically synthesized
caugucaguuccuccuuguccug

SEQ ID NO: 67840 - RNA, 23 nt, Artificial Sequence
  Chemically synthesized
augucaguuccuccuuguccugg

SEQ ID NO: 67841 - RNA, 23 nt, Artificial Sequence
  Chemically synthesized
ugucaguuccuccuuguccugga

SEQ ID NO: 67842 - RNA, 23 nt, Artificial Sequence
  Chemically synthesized
gcccuggagccucuugaaauuuc

SEQ ID NO: 67843 - RNA, 23 nt, Artificial Sequence
  Chemically synthesized
cccuggagccucuugaaauuucu

SEQ ID NO: 67844 - RNA, 23 nt, Artificial Sequence
  Chemically synthesized
ccuggagccucuugaaauuucuc

SEQ ID NO: 67845 - RNA, 23 nt, Artificial Sequence
  Chemically synthesized
gucacgaacaacagagggagcac

SEQ ID NO: 67846 - RNA, 23 nt, Artificial Sequence
  Chemically synthesized
ucacgaacaacagagggagcaca

SEQ ID NO: 67847 - RNA, 23 nt, Artificial Sequence
  Chemically synthesized
cacaaauuguucaaggacgaugg

SEQ ID NO: 67848 - RNA, 23 nt, Artificial Sequence
  Chemically synthesized
acaaauuguucaaggacgauggu

SEQ ID NO: 67849 - RNA, 23 nt, Artificial Sequence
  Chemically synthesized
caaauuguucaaggacgauggug

SEQ ID NO: 67850 - RNA, 23 nt, Artificial Sequence
  Chemically synthesized
aaauuguucaaggacgauggugc

SEQ ID NO: 67851 - RNA, 23 nt, Artificial Sequence
  Chemically synthesized
aauuguucaaggacgauggugcu

SEQ ID NO: 67852 - RNA, 23 nt, Artificial Sequence
  Chemically synthesized
ccagaaaucccgcacaucuucaa

SEQ ID NO: 67853 - RNA, 23 nt, Artificial Sequence
  Chemically synthesized
cagaaaucccgcacaucuucaac

SEQ ID NO: 67854 - RNA, 23 nt, Artificial Sequence
  Chemically synthesized
caggucugaaagcacgugauagc

SEQ ID NO: 67855 - RNA, 23 nt, Artificial Sequence
  Chemically synthesized
aggucugaaagcacgugauagcc

SEQ ID NO: 67856 - RNA, 23 nt, Artificial Sequence
  Chemically synthesized
ggucugaaagcacgugauagcca

SEQ ID NO: 67857 - RNA, 23 nt, Artificial Sequence
  Chemically synthesized
gucugaaagcacgugauagccaa

SEQ ID NO: 67858 - RNA, 23 nt, Artificial Sequence
  Chemically synthesized
ucugaaagcacgugauagccaaa

SEQ ID NO: 67859 - RNA, 23 nt, Artificial Sequence
  Chemically synthesized
agcauugcauacauagguauugg

SEQ ID NO: 67860 - RNA, 23 nt, Artificial Sequence
  Chemically synthesized
gcauugcauacauagguauuggg

SEQ ID NO: 67861 - RNA, 23 nt, Artificial Sequence
  Chemically synthesized
cauugcauacauagguauugggc

SEQ ID NO: 67862 - RNA, 23 nt, Artificial Sequence
  Chemically synthesized
auugcauacauagguauugggcc

SEQ ID NO: 67863 - RNA, 23 nt, Artificial Sequence
  Chemically synthesized
uugcauacauagguauugggcca

SEQ ID NO: 67864 - RNA, 23 nt, Artificial Sequence
  Chemically synthesized
gggcucaaaccucugcucaacug

SEQ ID NO: 67865 - RNA, 23 nt, Artificial Sequence
  Chemically synthesized
gcugggugauguagaugugcaca

SEQ ID NO: 67866 - RNA, 23 nt, Artificial Sequence
  Chemically synthesized
cugggugauguagaugugcacag

SEQ ID NO: 67867 - RNA, 23 nt, Artificial Sequence
  Chemically synthesized
cagcugacggaugacuugaagac

SEQ ID NO: 67868 - RNA, 23 nt, Artificial Sequence
  Chemically synthesized
agcugacggaugacuugaagacc

SEQ ID NO: 67869 - RNA, 23 nt, Artificial Sequence
  Chemically synthesized
gcugacggaugacuugaagacca

SEQ ID NO: 67870 - RNA, 23 nt, Artificial Sequence
  Chemically synthesized
cugacggaugacuugaagaccag

SEQ ID NO: 67871 - RNA, 23 nt, Artificial Sequence
  Chemically synthesized
ugacggaugacuugaagaccagg

SEQ ID NO: 67872 - RNA, 23 nt, Artificial Sequence
  Chemically synthesized
gggcaaagcuaccauggaugaug

SEQ ID NO: 67873 - RNA, 23 nt, Artificial Sequence
  Chemically synthesized
gggcugauggagaacagguacac

SEQ ID NO: 67874 - RNA, 23 nt, Artificial Sequence
  Chemically synthesized
ggcugauggagaacagguacaca

SEQ ID NO: 67875 - RNA, 23 nt, Artificial Sequence
  Chemically synthesized
gcugauggagaacagguacacau

SEQ ID NO: 67876 - RNA, 23 nt, Artificial Sequence
  Chemically synthesized
cugauggagaacagguacacauu

SEQ ID NO: 67877 - RNA, 23 nt, Artificial Sequence
  Chemically synthesized
ugauggagaacagguacacauuc

SEQ ID NO: 67878 - RNA, 23 nt, Artificial Sequence
  Chemically synthesized
gauggagaacagguacacauuca

SEQ ID NO: 67879 - RNA, 23 nt, Artificial Sequence
  Chemically synthesized
auggagaacagguacacauucac

SEQ ID NO: 67880 - RNA, 23 nt, Artificial Sequence
  Chemically synthesized
uggagaacagguacacauucacc

SEQ ID NO: 67881 - RNA, 23 nt, Artificial Sequence
  Chemically synthesized
ggagaacagguacacauucacca

SEQ ID NO: 67882 - RNA, 23 nt, Artificial Sequence
  Chemically synthesized
gagaacagguacacauucaccac

SEQ ID NO: 67883 - RNA, 23 nt, Artificial Sequence
  Chemically synthesized
agaacagguacacauucaccaca

SEQ ID NO: 67884 - RNA, 23 nt, Artificial Sequence
  Chemically synthesized
ugacguuaccuucuugccaaacc

SEQ ID NO: 67885 - RNA, 23 nt, Artificial Sequence
  Chemically synthesized
ggugucaacucagucucaauguc

SEQ ID NO: 67886 - RNA, 23 nt, Artificial Sequence
  Chemically synthesized
cgggcaacaauccaggcacugag

SEQ ID NO: 67887 - RNA, 23 nt, Artificial Sequence
  Chemically synthesized
gggcaacaauccaggcacugagc

SEQ ID NO: 67888 - RNA, 23 nt, Artificial Sequence
  Chemically synthesized
ggcaacaauccaggcacugagca

SEQ ID NO: 67889 - RNA, 23 nt, Artificial Sequence
  Chemically synthesized
gcaacaauccaggcacugagcag

SEQ ID NO: 67890 - RNA, 23 nt, Artificial Sequence
  Chemically synthesized
caacaauccaggcacugagcagg

SEQ ID NO: 67891 - RNA, 23 nt, Artificial Sequence
  Chemically synthesized
cacgaacaacagagggagcacac

SEQ ID NO: 67892 - RNA, 23 nt, Artificial Sequence
  Chemically synthesized
acgaacaacagagggagcacacg

SEQ ID NO: 67893 - RNA, 23 nt, Artificial Sequence
  Chemically synthesized
ucccgcacaucuucaaccaacac

SEQ ID NO: 67894 - RNA, 23 nt, Artificial Sequence
  Chemically synthesized
aguguuuucugcaggaagcuggg

SEQ ID NO: 67895 - RNA, 23 nt, Artificial Sequence
  Chemically synthesized
guguuuucugcaggaagcugggc

SEQ ID NO: 67896 - RNA, 23 nt, Artificial Sequence
  Chemically synthesized
uguuuucugcaggaagcugggca

SEQ ID NO: 67897 - RNA, 23 nt, Artificial Sequence
  Chemically synthesized
guuuucugcaggaagcugggcag

SEQ ID NO: 67898 - RNA, 23 nt, Artificial Sequence
  Chemically synthesized
uuuucugcaggaagcugggcagc

SEQ ID NO: 67899 - RNA, 23 nt, Artificial Sequence
  Chemically synthesized
cacgcucaccaggucugaaagca

SEQ ID NO: 67900 - RNA, 23 nt, Artificial Sequence
  Chemically synthesized
acgcucaccaggucugaaagcac

SEQ ID NO: 67901 - RNA, 23 nt, Artificial Sequence
  Chemically synthesized
cgcucaccaggucugaaagcacg

SEQ ID NO: 67902 - RNA, 23 nt, Artificial Sequence
  Chemically synthesized
gcucaccaggucugaaagcacgu

SEQ ID NO: 67903 - RNA, 23 nt, Artificial Sequence
  Chemically synthesized
cucaccaggucugaaagcacgug

SEQ ID NO: 67904 - RNA, 23 nt, Artificial Sequence
  Chemically synthesized
agacaugcacacacauaguacuu

SEQ ID NO: 67905 - RNA, 23 nt, Artificial Sequence
  Chemically synthesized
gaggugggaaaucagagaaggcu

SEQ ID NO: 67906 - RNA, 23 nt, Artificial Sequence
  Chemically synthesized
aggugggaaaucagagaaggcug

SEQ ID NO: 67907 - RNA, 23 nt, Artificial Sequence
  Chemically synthesized
ggugggaaaucagagaaggcuga

SEQ ID NO: 67908 - RNA, 23 nt, Artificial Sequence
  Chemically synthesized
gugggaaaucagagaaggcugag

SEQ ID NO: 67909 - RNA, 23 nt, Artificial Sequence
  Chemically synthesized
ugggaaaucagagaaggcugagg

SEQ ID NO: 67910 - RNA, 23 nt, Artificial Sequence
  Chemically synthesized
accacccaucaaaucgcugcacc

SEQ ID NO: 67911 - RNA, 23 nt, Artificial Sequence
  Chemically synthesized
ccacccaucaaaucgcugcaccu

SEQ ID NO: 67912 - RNA, 23 nt, Artificial Sequence
  Chemically synthesized
cacccaucaaaucgcugcaccuc

SEQ ID NO: 67913 - RNA, 23 nt, Artificial Sequence
  Chemically synthesized
ugggugauguagaugugcacaga

SEQ ID NO: 67914 - RNA, 23 nt, Artificial Sequence
  Chemically synthesized
gacggaugacuugaagaccaggu

SEQ ID NO: 67915 - RNA, 23 nt, Artificial Sequence
  Chemically synthesized
acggaugacuugaagaccagguc

SEQ ID NO: 67916 - RNA, 23 nt, Artificial Sequence
  Chemically synthesized
ucuuugaggauggaggcaaaagg

SEQ ID NO: 67917 - RNA, 23 nt, Artificial Sequence
  Chemically synthesized
cuuugaggauggaggcaaaaggg

SEQ ID NO: 67918 - RNA, 23 nt, Artificial Sequence
  Chemically synthesized
uuugaggauggaggcaaaagggg

SEQ ID NO: 67919 - RNA, 23 nt, Artificial Sequence
  Chemically synthesized
uugaggauggaggcaaaaggggu

SEQ ID NO: 67920 - RNA, 23 nt, Artificial Sequence
  Chemically synthesized
ugaggauggaggcaaaaggggug

SEQ ID NO: 67921 - RNA, 23 nt, Artificial Sequence
  Chemically synthesized
agcuuuggguaucuggcacaucu

SEQ ID NO: 67922 - RNA, 23 nt, Artificial Sequence
  Chemically synthesized
gcuuuggguaucuggcacaucug

SEQ ID NO: 67923 - RNA, 23 nt, Artificial Sequence
  Chemically synthesized
cuuuggguaucuggcacaucugu

SEQ ID NO: 67924 - RNA, 23 nt, Artificial Sequence
  Chemically synthesized
uuuggguaucuggcacaucuguc

SEQ ID NO: 67925 - RNA, 23 nt, Artificial Sequence
  Chemically synthesized
uuggguaucuggcacaucuguca

SEQ ID NO: 67926 - RNA, 23 nt, Artificial Sequence
  Chemically synthesized
auggaugaugagcaggacauaga

SEQ ID NO: 67927 - RNA, 23 nt, Artificial Sequence
  Chemically synthesized
uggaugaugagcaggacauagag

SEQ ID NO: 67928 - RNA, 23 nt, Artificial Sequence
  Chemically synthesized
ggaugaugagcaggacauagagc

SEQ ID NO: 67929 - RNA, 23 nt, Artificial Sequence
  Chemically synthesized
gaugaugagcaggacauagagca

SEQ ID NO: 67930 - RNA, 23 nt, Artificial Sequence
  Chemically synthesized
augaugagcaggacauagagcag

SEQ ID NO: 67931 - RNA, 23 nt, Artificial Sequence
  Chemically synthesized
agagcaggauguagagguggugg

SEQ ID NO: 67932 - RNA, 23 nt, Artificial Sequence
  Chemically synthesized
uaccuucuugccaaaccuccgcc

SEQ ID NO: 67933 - RNA, 23 nt, Artificial Sequence
  Chemically synthesized
accuucuugccaaaccuccgccg

SEQ ID NO: 67934 - RNA, 23 nt, Artificial Sequence
  Chemically synthesized
gaaaaucuucccaugucaguucc

SEQ ID NO: 67935 - RNA, 23 nt, Artificial Sequence
  Chemically synthesized
aaaaucuucccaugucaguuccu

SEQ ID NO: 67936 - RNA, 23 nt, Artificial Sequence
  Chemically synthesized
aaaucuucccaugucaguuccuc

SEQ ID NO: 67937 - RNA, 23 nt, Artificial Sequence
  Chemically synthesized
ucccaugucaguuccuccuuguc

SEQ ID NO: 67938 - RNA, 23 nt, Artificial Sequence
  Chemically synthesized
ugccugaaaaaggucuccaggag

SEQ ID NO: 67939 - RNA, 23 nt, Artificial Sequence
  Chemically synthesized
gccugaaaaaggucuccaggagg

SEQ ID NO: 67940 - RNA, 23 nt, Artificial Sequence
  Chemically synthesized
ccugaaaaaggucuccaggaggu

SEQ ID NO: 67941 - RNA, 23 nt, Artificial Sequence
  Chemically synthesized
cugaaaaaggucuccaggaggug

SEQ ID NO: 67942 - RNA, 23 nt, Artificial Sequence
  Chemically synthesized
ugaaaaaggucuccaggaggugc

SEQ ID NO: 67943 - RNA, 23 nt, Artificial Sequence
  Chemically synthesized
caucuucaaccaacacauggucc

SEQ ID NO: 67944 - RNA, 23 nt, Artificial Sequence
  Chemically synthesized
aucuucaaccaacacaugguccu

SEQ ID NO: 67945 - RNA, 23 nt, Artificial Sequence
  Chemically synthesized
ucuucaaccaacacaugguccuc

SEQ ID NO: 67946 - RNA, 23 nt, Artificial Sequence
  Chemically synthesized
cuucaaccaacacaugguccucu

SEQ ID NO: 67947 - RNA, 23 nt, Artificial Sequence
  Chemically synthesized
uucaaccaacacaugguccucuc

SEQ ID NO: 67948 - RNA, 23 nt, Artificial Sequence
  Chemically synthesized
cggagagcucuggagacacuuga

SEQ ID NO: 67949 - RNA, 23 nt, Artificial Sequence
  Chemically synthesized
ggagagcucuggagacacuugag

SEQ ID NO: 67950 - RNA, 23 nt, Artificial Sequence
  Chemically synthesized
gagagcucuggagacacuugagu

SEQ ID NO: 67951 - RNA, 23 nt, Artificial Sequence
  Chemically synthesized
agagcucuggagacacuugaguu

SEQ ID NO: 67952 - RNA, 23 nt, Artificial Sequence
  Chemically synthesized
gagcucuggagacacuugaguuc

SEQ ID NO: 67953 - RNA, 23 nt, Artificial Sequence
  Chemically synthesized
gccacucauacacagcgauguuc

SEQ ID NO: 67954 - RNA, 23 nt, Artificial Sequence
  Chemically synthesized
ccacucauacacagcgauguucu

SEQ ID NO: 67955 - RNA, 23 nt, Artificial Sequence
  Chemically synthesized
cacucauacacagcgauguucug

SEQ ID NO: 67956 - RNA, 23 nt, Artificial Sequence
  Chemically synthesized
acucauacacagcgauguucugg

SEQ ID NO: 67957 - RNA, 23 nt, Artificial Sequence
  Chemically synthesized
cucauacacagcgauguucuggu

SEQ ID NO: 67958 - RNA, 23 nt, Artificial Sequence
  Chemically synthesized
ccaucugugcuccaugagguugu

SEQ ID NO: 67959 - RNA, 23 nt, Artificial Sequence
  Chemically synthesized
caucugugcuccaugagguuguu

SEQ ID NO: 67960 - RNA, 23 nt, Artificial Sequence
  Chemically synthesized
aucugugcuccaugagguuguug

SEQ ID NO: 67961 - RNA, 23 nt, Artificial Sequence
  Chemically synthesized
ucugugcuccaugagguuguugu

SEQ ID NO: 67962 - RNA, 23 nt, Artificial Sequence
  Chemically synthesized
cugugcuccaugagguuguugua

SEQ ID NO: 67963 - RNA, 23 nt, Artificial Sequence
  Chemically synthesized
agccagaaauaggaagaacagag

SEQ ID NO: 67964 - RNA, 23 nt, Artificial Sequence
  Chemically synthesized
cgccuucaccacgcugaucucca

SEQ ID NO: 67965 - RNA, 23 nt, Artificial Sequence
  Chemically synthesized
gccuucaccacgcugaucuccac

SEQ ID NO: 67966 - RNA, 23 nt, Artificial Sequence
  Chemically synthesized
ccuucaccacgcugaucuccacc

SEQ ID NO: 67967 - RNA, 23 nt, Artificial Sequence
  Chemically synthesized
cuucaccacgcugaucuccaccu

SEQ ID NO: 67968 - RNA, 23 nt, Artificial Sequence
  Chemically synthesized
uucaccacgcugaucuccaccuu

SEQ ID NO: 67969 - RNA, 23 nt, Artificial Sequence
  Chemically synthesized
cgaacaacagagggagcacacgc

SEQ ID NO: 67970 - RNA, 23 nt, Artificial Sequence
  Chemically synthesized
gaacaacagagggagcacacgcu

SEQ ID NO: 67971 - RNA, 23 nt, Artificial Sequence
  Chemically synthesized
aacaacagagggagcacacgcug

SEQ ID NO: 67972 - RNA, 23 nt, Artificial Sequence
  Chemically synthesized
uuucuucaaucuccuucuuggag

SEQ ID NO: 67973 - RNA, 23 nt, Artificial Sequence
  Chemically synthesized
uucuucaaucuccuucuuggaga

SEQ ID NO: 67974 - RNA, 23 nt, Artificial Sequence
  Chemically synthesized
ucuucaaucuccuucuuggagaa

SEQ ID NO: 67975 - RNA, 23 nt, Artificial Sequence
  Chemically synthesized
gggcagccacucauacacagcga

SEQ ID NO: 67976 - RNA, 23 nt, Artificial Sequence
  Chemically synthesized
ggcagccacucauacacagcgau

SEQ ID NO: 67977 - RNA, 23 nt, Artificial Sequence
  Chemically synthesized
gcagccacucauacacagcgaug

SEQ ID NO: 67978 - RNA, 23 nt, Artificial Sequence
  Chemically synthesized
cagccacucauacacagcgaugu

SEQ ID NO: 67979 - RNA, 23 nt, Artificial Sequence
  Chemically synthesized
agccacucauacacagcgauguu

SEQ ID NO: 67980 - RNA, 23 nt, Artificial Sequence
  Chemically synthesized
cuuaaaaccuugggugaaauuag

SEQ ID NO: 67981 - RNA, 23 nt, Artificial Sequence
  Chemically synthesized
uuaaaaccuugggugaaauuagu

SEQ ID NO: 67982 - RNA, 23 nt, Artificial Sequence
  Chemically synthesized
uaaaaccuugggugaaauuaguu

SEQ ID NO: 67983 - RNA, 23 nt, Artificial Sequence
  Chemically synthesized
ccagaugaaguagaucuucuuac

SEQ ID NO: 67984 - RNA, 23 nt, Artificial Sequence
  Chemically synthesized
cagaugaaguagaucuucuuaca

SEQ ID NO: 67985 - RNA, 23 nt, Artificial Sequence
  Chemically synthesized
agaugaaguagaucuucuuacag

SEQ ID NO: 67986 - RNA, 23 nt, Artificial Sequence
  Chemically synthesized
gaugaaguagaucuucuuacaga

SEQ ID NO: 67987 - RNA, 23 nt, Artificial Sequence
  Chemically synthesized
augaaguagaucuucuuacagaa

SEQ ID NO: 67988 - RNA, 23 nt, Artificial Sequence
  Chemically synthesized
cuuacagaacacuuggcagcuga

SEQ ID NO: 67989 - RNA, 23 nt, Artificial Sequence
  Chemically synthesized
uuacagaacacuuggcagcugac

SEQ ID NO: 67990 - RNA, 23 nt, Artificial Sequence
  Chemically synthesized
cacgcugaucuccaccuucuucc

SEQ ID NO: 67991 - RNA, 23 nt, Artificial Sequence
  Chemically synthesized
acgcugaucuccaccuucuuccg

SEQ ID NO: 67992 - RNA, 23 nt, Artificial Sequence
  Chemically synthesized
cgcugaucuccaccuucuuccgg

SEQ ID NO: 67993 - RNA, 23 nt, Artificial Sequence
  Chemically synthesized
gcugaucuccaccuucuuccggc

SEQ ID NO: 67994 - RNA, 23 nt, Artificial Sequence
  Chemically synthesized
cugaucuccaccuucuuccggcu

SEQ ID NO: 67995 - RNA, 23 nt, Artificial Sequence
  Chemically synthesized
ggggaucuugagcagcagagugc

SEQ ID NO: 67996 - RNA, 23 nt, Artificial Sequence
  Chemically synthesized
gggaucuugagcagcagagugcg

SEQ ID NO: 67997 - RNA, 23 nt, Artificial Sequence
  Chemically synthesized
ggaucuugagcagcagagugcgg

SEQ ID NO: 67998 - RNA, 23 nt, Artificial Sequence
  Chemically synthesized
gaucuugagcagcagagugcggc

SEQ ID NO: 67999 - RNA, 23 nt, Artificial Sequence
  Chemically synthesized
aucuugagcagcagagugcggcg

SEQ ID NO: 68000 - RNA, 23 nt, Artificial Sequence
  Chemically synthesized
ggauaaguccugguuguacaggg

SEQ ID NO: 68001 - RNA, 23 nt, Artificial Sequence
  Chemically synthesized
gauaaguccugguuguacagggc

SEQ ID NO: 68002 - RNA, 23 nt, Artificial Sequence
  Chemically synthesized
auaaguccugguuguacagggca

SEQ ID NO: 68003 - RNA, 23 nt, Artificial Sequence
  Chemically synthesized
uaaguccugguuguacagggcag

SEQ ID NO: 68004 - RNA, 23 nt, Artificial Sequence
  Chemically synthesized
aaguccugguuguacagggcagc

SEQ ID NO: 68005 - RNA, 23 nt, Artificial Sequence
  Chemically synthesized
gaguguuuucugcaggaagcugg

SEQ ID NO: 68006 - RNA, 23 nt, Artificial Sequence
  Chemically synthesized
cagggucugaugaaagaacgugc

SEQ ID NO: 68007 - RNA, 23 nt, Artificial Sequence
  Chemically synthesized
agggucugaugaaagaacgugcu

SEQ ID NO: 68008 - RNA, 23 nt, Artificial Sequence
  Chemically synthesized
gggucugaugaaagaacgugcuu

SEQ ID NO: 68009 - RNA, 23 nt, Artificial Sequence
  Chemically synthesized
ggucugaugaaagaacgugcuua

SEQ ID NO: 68010 - RNA, 23 nt, Artificial Sequence
  Chemically synthesized
gucugaugaaagaacgugcuuaa

SEQ ID NO: 68011 - RNA, 23 nt, Artificial Sequence
  Chemically synthesized
gacuuguacucaaagcccugggg

SEQ ID NO: 68012 - RNA, 23 nt, Artificial Sequence
  Chemically synthesized
acuuguacucaaagcccuggggc

SEQ ID NO: 68013 - RNA, 23 nt, Artificial Sequence
  Chemically synthesized
cuuguacucaaagcccuggggcc

SEQ ID NO: 68014 - RNA, 23 nt, Artificial Sequence
  Chemically synthesized
accauggaugaugagcaggacau

SEQ ID NO: 68015 - RNA, 23 nt, Artificial Sequence
  Chemically synthesized
ccauggaugaugagcaggacaua

SEQ ID NO: 68016 - RNA, 23 nt, Artificial Sequence
  Chemically synthesized
cauggaugaugagcaggacauag

SEQ ID NO: 68017 - RNA, 23 nt, Artificial Sequence
  Chemically synthesized
acacauucaccacauggcccaca

SEQ ID NO: 68018 - RNA, 23 nt, Artificial Sequence
  Chemically synthesized
cacauucaccacauggcccacac

SEQ ID NO: 68019 - RNA, 23 nt, Artificial Sequence
  Chemically synthesized
acauucaccacauggcccacacu

SEQ ID NO: 68020 - RNA, 23 nt, Artificial Sequence
  Chemically synthesized
cauucaccacauggcccacacug

SEQ ID NO: 68021 - RNA, 23 nt, Artificial Sequence
  Chemically synthesized
auucaccacauggcccacacugu

SEQ ID NO: 68022 - RNA, 23 nt, Artificial Sequence
  Chemically synthesized
aggcaaugaggcgauggaagucc

SEQ ID NO: 68023 - RNA, 23 nt, Artificial Sequence
  Chemically synthesized
ggcaaugaggcgauggaagucca

SEQ ID NO: 68024 - RNA, 23 nt, Artificial Sequence
  Chemically synthesized
gcaaugaggcgauggaaguccac

SEQ ID NO: 68025 - RNA, 23 nt, Artificial Sequence
  Chemically synthesized
caaugaggcgauggaaguccacg

SEQ ID NO: 68026 - RNA, 23 nt, Artificial Sequence
  Chemically synthesized
aaugaggcgauggaaguccacgg

SEQ ID NO: 68027 - RNA, 23 nt, Artificial Sequence
  Chemically synthesized
ucggaaggacagguagccauugc

SEQ ID NO: 68028 - RNA, 23 nt, Artificial Sequence
  Chemically synthesized
cggaaggacagguagccauugcc

SEQ ID NO: 68029 - RNA, 23 nt, Artificial Sequence
  Chemically synthesized
ggaaggacagguagccauugcca

SEQ ID NO: 68030 - RNA, 23 nt, Artificial Sequence
  Chemically synthesized
gaaggacagguagccauugccau

SEQ ID NO: 68031 - RNA, 23 nt, Artificial Sequence
  Chemically synthesized
aaggacagguagccauugccauc

SEQ ID NO: 68032 - RNA, 23 nt, Artificial Sequence
  Chemically synthesized
ugaaauuucucauccggagccgg

SEQ ID NO: 68033 - RNA, 23 nt, Artificial Sequence
  Chemically synthesized
gaaauuucucauccggagccggg

SEQ ID NO: 68034 - RNA, 23 nt, Artificial Sequence
  Chemically synthesized
aaauuucucauccggagccgggc

SEQ ID NO: 68035 - RNA, 23 nt, Artificial Sequence
  Chemically synthesized
aauuucucauccggagccgggca

SEQ ID NO: 68036 - RNA, 23 nt, Artificial Sequence
  Chemically synthesized
gccgcacaaauuguucaaggacg

SEQ ID NO: 68037 - RNA, 23 nt, Artificial Sequence
  Chemically synthesized
ccgcacaaauuguucaaggacga

SEQ ID NO: 68038 - RNA, 23 nt, Artificial Sequence
  Chemically synthesized
cgcacaaauuguucaaggacgau

SEQ ID NO: 68039 - RNA, 23 nt, Artificial Sequence
  Chemically synthesized
gcacaaauuguucaaggacgaug

SEQ ID NO: 68040 - RNA, 23 nt, Artificial Sequence
  Chemically synthesized
uuucuguaaauggcuugccaugg

SEQ ID NO: 68041 - RNA, 23 nt, Artificial Sequence
  Chemically synthesized
gggaggguucuaagaugccagca

SEQ ID NO: 68042 - RNA, 23 nt, Artificial Sequence
  Chemically synthesized
ggaggguucuaagaugccagcau

SEQ ID NO: 68043 - RNA, 23 nt, Artificial Sequence
  Chemically synthesized
gaggguucuaagaugccagcauc

SEQ ID NO: 68044 - RNA, 23 nt, Artificial Sequence
  Chemically synthesized
aggguucuaagaugccagcaucc

SEQ ID NO: 68045 - RNA, 23 nt, Artificial Sequence
  Chemically synthesized
acuucucacucuagucccuagac

SEQ ID NO: 68046 - RNA, 23 nt, Artificial Sequence
  Chemically synthesized
cuucucacucuagucccuagaca

SEQ ID NO: 68047 - RNA, 23 nt, Artificial Sequence
  Chemically synthesized
uucucacucuagucccuagacac

SEQ ID NO: 68048 - RNA, 23 nt, Artificial Sequence
  Chemically synthesized
gggaaaucagagaaggcugaggc

SEQ ID NO: 68049 - RNA, 23 nt, Artificial Sequence
  Chemically synthesized
ggaaaucagagaaggcugaggca

SEQ ID NO: 68050 - RNA, 23 nt, Artificial Sequence
  Chemically synthesized
gaaaucagagaaggcugaggcag

SEQ ID NO: 68051 - RNA, 23 nt, Artificial Sequence
  Chemically synthesized
aaaucagagaaggcugaggcagc

SEQ ID NO: 68052 - RNA, 23 nt, Artificial Sequence
  Chemically synthesized
aaucagagaaggcugaggcagcc

SEQ ID NO: 68053 - RNA, 23 nt, Artificial Sequence
  Chemically synthesized
ccuguugaugagcugacaggccu

SEQ ID NO: 68054 - RNA, 23 nt, Artificial Sequence
  Chemically synthesized
cuguugaugagcugacaggccuu

SEQ ID NO: 68055 - RNA, 23 nt, Artificial Sequence
  Chemically synthesized
uguugaugagcugacaggccuuu

SEQ ID NO: 68056 - RNA, 23 nt, Artificial Sequence
  Chemically synthesized
guugaugagcugacaggccuuuu

SEQ ID NO: 68057 - RNA, 23 nt, Artificial Sequence
  Chemically synthesized
uugaugagcugacaggccuuuuc

SEQ ID NO: 68058 - RNA, 23 nt, Artificial Sequence
  Chemically synthesized
ggagaucucgaugaaggaucuca

SEQ ID NO: 68059 - RNA, 23 nt, Artificial Sequence
  Chemically synthesized
gagaucucgaugaaggaucucag

SEQ ID NO: 68060 - RNA, 23 nt, Artificial Sequence
  Chemically synthesized
agaucucgaugaaggaucucagc

SEQ ID NO: 68061 - RNA, 23 nt, Artificial Sequence
  Chemically synthesized
gaucucgaugaaggaucucagca

SEQ ID NO: 68062 - RNA, 23 nt, Artificial Sequence
  Chemically synthesized
aucucgaugaaggaucucagcau

SEQ ID NO: 68063 - RNA, 23 nt, Artificial Sequence
  Chemically synthesized
acucauccuuggaaaugaggcca

SEQ ID NO: 68064 - RNA, 23 nt, Artificial Sequence
  Chemically synthesized
cucauccuuggaaaugaggccau

SEQ ID NO: 68065 - RNA, 23 nt, Artificial Sequence
  Chemically synthesized
ucauccuuggaaaugaggccauu

SEQ ID NO: 68066 - RNA, 23 nt, Artificial Sequence
  Chemically synthesized
cauccuuggaaaugaggccauuc

SEQ ID NO: 68067 - RNA, 23 nt, Artificial Sequence
  Chemically synthesized
auccuuggaaaugaggccauucc

SEQ ID NO: 68068 - RNA, 23 nt, Artificial Sequence
  Chemically synthesized
auuguucaaggacgauggugcug

SEQ ID NO: 68069 - RNA, 23 nt, Artificial Sequence
  Chemically synthesized
uuguucaaggacgauggugcuga

SEQ ID NO: 68070 - RNA, 23 nt, Artificial Sequence
  Chemically synthesized
uguucaaggacgauggugcugaa

SEQ ID NO: 68071 - RNA, 23 nt, Artificial Sequence
  Chemically synthesized
gcacaucuucaaccaacacaugg

SEQ ID NO: 68072 - RNA, 23 nt, Artificial Sequence
  Chemically synthesized
cacaucuucaaccaacacauggu

SEQ ID NO: 68073 - RNA, 23 nt, Artificial Sequence
  Chemically synthesized
acaucuucaaccaacacaugguc

SEQ ID NO: 68074 - RNA, 23 nt, Artificial Sequence
  Chemically synthesized
cacuuuguaggcuugggugcuca

SEQ ID NO: 68075 - RNA, 23 nt, Artificial Sequence
  Chemically synthesized
acuuuguaggcuugggugcucac

SEQ ID NO: 68076 - RNA, 23 nt, Artificial Sequence
  Chemically synthesized
cuuuguaggcuugggugcucacg

SEQ ID NO: 68077 - RNA, 23 nt, Artificial Sequence
  Chemically synthesized
uuuguaggcuugggugcucacgg

SEQ ID NO: 68078 - RNA, 23 nt, Artificial Sequence
  Chemically synthesized
uuguaggcuugggugcucacggc

SEQ ID NO: 68079 - RNA, 23 nt, Artificial Sequence
  Chemically synthesized
ugcauacauagguauugggccag

SEQ ID NO: 68080 - RNA, 23 nt, Artificial Sequence
  Chemically synthesized
ucuguaaauggcuugccaugggu

SEQ ID NO: 68081 - RNA, 23 nt, Artificial Sequence
  Chemically synthesized
cuguaaauggcuugccauggguc

SEQ ID NO: 68082 - RNA, 23 nt, Artificial Sequence
  Chemically synthesized
uguaaauggcuugccaugggucc

SEQ ID NO: 68083 - RNA, 23 nt, Artificial Sequence
  Chemically synthesized
guaaauggcuugccaugggucca

SEQ ID NO: 68084 - RNA, 23 nt, Artificial Sequence
  Chemically synthesized
uaaauggcuugccauggguccag

SEQ ID NO: 68085 - RNA, 23 nt, Artificial Sequence
  Chemically synthesized
gcugguacacgccaucugcauag

SEQ ID NO: 68086 - RNA, 23 nt, Artificial Sequence
  Chemically synthesized
uucuaagaugccagcauccaugc

SEQ ID NO: 68087 - RNA, 23 nt, Artificial Sequence
  Chemically synthesized
ucuaagaugccagcauccaugcu

SEQ ID NO: 68088 - RNA, 23 nt, Artificial Sequence
  Chemically synthesized
cuaagaugccagcauccaugcuc

SEQ ID NO: 68089 - RNA, 23 nt, Artificial Sequence
  Chemically synthesized
uaagaugccagcauccaugcucc

SEQ ID NO: 68090 - RNA, 23 nt, Artificial Sequence
  Chemically synthesized
aagaugccagcauccaugcuccc

SEQ ID NO: 68091 - RNA, 23 nt, Artificial Sequence
  Chemically synthesized
cuccaugagguuguuguaccacc

SEQ ID NO: 68092 - RNA, 23 nt, Artificial Sequence
  Chemically synthesized
uccaugagguuguuguaccaccc

SEQ ID NO: 68093 - RNA, 23 nt, Artificial Sequence
  Chemically synthesized
ccaugagguuguuguaccaccca

SEQ ID NO: 68094 - RNA, 23 nt, Artificial Sequence
  Chemically synthesized
caugagguuguuguaccacccau

SEQ ID NO: 68095 - RNA, 23 nt, Artificial Sequence
  Chemically synthesized
augagguuguuguaccacccauc

SEQ ID NO: 68096 - RNA, 23 nt, Artificial Sequence
  Chemically synthesized
aaguucucauaauggugggagaa

SEQ ID NO: 68097 - RNA, 23 nt, Artificial Sequence
  Chemically synthesized
acuaacacugacaccucaaacuu

SEQ ID NO: 68098 - RNA, 23 nt, Artificial Sequence
  Chemically synthesized
cuaacacugacaccucaaacuua

SEQ ID NO: 68099 - RNA, 23 nt, Artificial Sequence
  Chemically synthesized
uaacacugacaccucaaacuuau

SEQ ID NO: 68100 - RNA, 23 nt, Artificial Sequence
  Chemically synthesized
aacacugacaccucaaacuuaug

SEQ ID NO: 68101 - RNA, 23 nt, Artificial Sequence
  Chemically synthesized
ggcccucuccaaaugguccauca

SEQ ID NO: 68102 - RNA, 23 nt, Artificial Sequence
  Chemically synthesized
gcccucuccaaaugguccaucaa

SEQ ID NO: 68103 - RNA, 23 nt, Artificial Sequence
  Chemically synthesized
cccucuccaaaugguccaucaag

SEQ ID NO: 68104 - RNA, 23 nt, Artificial Sequence
  Chemically synthesized
ccucuccaaaugguccaucaagg

SEQ ID NO: 68105 - RNA, 23 nt, Artificial Sequence
  Chemically synthesized
cucuccaaaugguccaucaaggu

SEQ ID NO: 68106 - RNA, 23 nt, Artificial Sequence
  Chemically synthesized
gaaagagaugcuggcugcugugc

SEQ ID NO: 68107 - RNA, 23 nt, Artificial Sequence
  Chemically synthesized
aaagagaugcuggcugcugugcc

SEQ ID NO: 68108 - RNA, 23 nt, Artificial Sequence
  Chemically synthesized
aagagaugcuggcugcugugccc

SEQ ID NO: 68109 - RNA, 23 nt, Artificial Sequence
  Chemically synthesized
gcaguuguuggagaucucgauga

SEQ ID NO: 68110 - RNA, 23 nt, Artificial Sequence
  Chemically synthesized
caguuguuggagaucucgaugaa

SEQ ID NO: 68111 - RNA, 23 nt, Artificial Sequence
  Chemically synthesized
aguuguuggagaucucgaugaag

SEQ ID NO: 68112 - RNA, 23 nt, Artificial Sequence
  Chemically synthesized
uuucaugaagaccaccaggaugu

SEQ ID NO: 68113 - RNA, 23 nt, Artificial Sequence
  Chemically synthesized
gacgaaguugaccuucuguggag

SEQ ID NO: 68114 - RNA, 23 nt, Artificial Sequence
  Chemically synthesized
acgaaguugaccuucuguggagg

SEQ ID NO: 68115 - RNA, 23 nt, Artificial Sequence
  Chemically synthesized
cgaaguugaccuucuguggaggc

SEQ ID NO: 68116 - RNA, 23 nt, Artificial Sequence
  Chemically synthesized
gaaguugaccuucuguggaggcu

SEQ ID NO: 68117 - RNA, 23 nt, Artificial Sequence
  Chemically synthesized
aaguugaccuucuguggaggcug

SEQ ID NO: 68118 - RNA, 23 nt, Artificial Sequence
  Chemically synthesized
cuccuuguggccuugccauucca

SEQ ID NO: 68119 - RNA, 23 nt, Artificial Sequence
  Chemically synthesized
uccuuguggccuugccauuccaa

SEQ ID NO: 68120 - RNA, 23 nt, Artificial Sequence
  Chemically synthesized
ccuuguggccuugccauuccaaa

SEQ ID NO: 68121 - RNA, 23 nt, Artificial Sequence
  Chemically synthesized
cuuguggccuugccauuccaaag

SEQ ID NO: 68122 - RNA, 23 nt, Artificial Sequence
  Chemically synthesized
uuguggccuugccauuccaaagc

SEQ ID NO: 68123 - RNA, 23 nt, Artificial Sequence
  Chemically synthesized
ggucaauguugauaacagcgacc

SEQ ID NO: 68124 - RNA, 23 nt, Artificial Sequence
  Chemically synthesized
gucaauguugauaacagcgacca

SEQ ID NO: 68125 - RNA, 23 nt, Artificial Sequence
  Chemically synthesized
ucaauguugauaacagcgaccag

SEQ ID NO: 68126 - RNA, 23 nt, Artificial Sequence
  Chemically synthesized
caauguugauaacagcgaccagc

SEQ ID NO: 68127 - RNA, 23 nt, Artificial Sequence
  Chemically synthesized
aauguugauaacagcgaccagca

SEQ ID NO: 68128 - RNA, 23 nt, Artificial Sequence
  Chemically synthesized
uuucggauuucuucaaucuccuu

SEQ ID NO: 68129 - RNA, 23 nt, Artificial Sequence
  Chemically synthesized
uucggauuucuucaaucuccuuc

SEQ ID NO: 68130 - RNA, 23 nt, Artificial Sequence
  Chemically synthesized
guucaaggacgauggugcugaac

SEQ ID NO: 68131 - RNA, 23 nt, Artificial Sequence
  Chemically synthesized
uucaaggacgauggugcugaaca

SEQ ID NO: 68132 - RNA, 23 nt, Artificial Sequence
  Chemically synthesized
ucaaggacgauggugcugaacag

SEQ ID NO: 68133 - RNA, 23 nt, Artificial Sequence
  Chemically synthesized
ucaaccaacacaugguccucucg

SEQ ID NO: 68134 - RNA, 23 nt, Artificial Sequence
  Chemically synthesized
cacgaacucugaggagaugcugg

SEQ ID NO: 68135 - RNA, 23 nt, Artificial Sequence
  Chemically synthesized
acgaacucugaggagaugcuggg

SEQ ID NO: 68136 - RNA, 23 nt, Artificial Sequence
  Chemically synthesized
cgaacucugaggagaugcugggg

SEQ ID NO: 68137 - RNA, 23 nt, Artificial Sequence
  Chemically synthesized
gaacucugaggagaugcuggggu

SEQ ID NO: 68138 - RNA, 23 nt, Artificial Sequence
  Chemically synthesized
aacucugaggagaugcugggguc

SEQ ID NO: 68139 - RNA, 23 nt, Artificial Sequence
  Chemically synthesized
gcauacauagguauugggccagg

SEQ ID NO: 68140 - RNA, 23 nt, Artificial Sequence
  Chemically synthesized
cauacauagguauugggccaggg

SEQ ID NO: 68141 - RNA, 23 nt, Artificial Sequence
  Chemically synthesized
auacauagguauugggccagggu

SEQ ID NO: 68142 - RNA, 23 nt, Artificial Sequence
  Chemically synthesized
uacauagguauugggccaggguc

SEQ ID NO: 68143 - RNA, 23 nt, Artificial Sequence
  Chemically synthesized
cuugagaugguguugcuaagguc

SEQ ID NO: 68144 - RNA, 23 nt, Artificial Sequence
  Chemically synthesized
uugagaugguguugcuaaggucu

SEQ ID NO: 68145 - RNA, 23 nt, Artificial Sequence
  Chemically synthesized
ugagaugguguugcuaaggucuc

SEQ ID NO: 68146 - RNA, 23 nt, Artificial Sequence
  Chemically synthesized
uucuguaaauggcuugccauggg

SEQ ID NO: 68147 - RNA, 23 nt, Artificial Sequence
  Chemically synthesized
acacauacagacaugcacacaca

SEQ ID NO: 68148 - RNA, 23 nt, Artificial Sequence
  Chemically synthesized
cacauacagacaugcacacacau

SEQ ID NO: 68149 - RNA, 23 nt, Artificial Sequence
  Chemically synthesized
cucacagauguacagcauagugg

SEQ ID NO: 68150 - RNA, 23 nt, Artificial Sequence
  Chemically synthesized
ucacagauguacagcauaguggu

SEQ ID NO: 68151 - RNA, 23 nt, Artificial Sequence
  Chemically synthesized
cacagauguacagcauagugguc

SEQ ID NO: 68152 - RNA, 23 nt, Artificial Sequence
  Chemically synthesized
caggaagaagauguggaaacggg

SEQ ID NO: 68153 - RNA, 23 nt, Artificial Sequence
  Chemically synthesized
aggaagaagauguggaaacgggg

SEQ ID NO: 68154 - RNA, 23 nt, Artificial Sequence
  Chemically synthesized
ggaagaagauguggaaacggggc

SEQ ID NO: 68155 - RNA, 23 nt, Artificial Sequence
  Chemically synthesized
gaagaagauguggaaacggggca

SEQ ID NO: 68156 - RNA, 23 nt, Artificial Sequence
  Chemically synthesized
aagaagauguggaaacggggcag

SEQ ID NO: 68157 - RNA, 23 nt, Artificial Sequence
  Chemically synthesized
agcgguugaggaagguuucucgc

SEQ ID NO: 68158 - RNA, 23 nt, Artificial Sequence
  Chemically synthesized
gcgguugaggaagguuucucgca

SEQ ID NO: 68159 - RNA, 23 nt, Artificial Sequence
  Chemically synthesized
cgguugaggaagguuucucgcag

SEQ ID NO: 68160 - RNA, 23 nt, Artificial Sequence
  Chemically synthesized
gguugaggaagguuucucgcagg

SEQ ID NO: 68161 - RNA, 23 nt, Artificial Sequence
  Chemically synthesized
guugaggaagguuucucgcagga

SEQ ID NO: 68162 - RNA, 23 nt, Artificial Sequence
  Chemically synthesized
gcagcaugaagugaaaaucuucc

SEQ ID NO: 68163 - RNA, 23 nt, Artificial Sequence
  Chemically synthesized
ggccuuggacaggcaguuguugg

SEQ ID NO: 68164 - RNA, 23 nt, Artificial Sequence
  Chemically synthesized
gccuuggacaggcaguuguugga

SEQ ID NO: 68165 - RNA, 23 nt, Artificial Sequence
  Chemically synthesized
ccuuggacaggcaguuguuggag

SEQ ID NO: 68166 - RNA, 23 nt, Artificial Sequence
  Chemically synthesized
cuuggacaggcaguuguuggaga

SEQ ID NO: 68167 - RNA, 23 nt, Artificial Sequence
  Chemically synthesized
uuggacaggcaguuguuggagau

SEQ ID NO: 68168 - RNA, 23 nt, Artificial Sequence
  Chemically synthesized
cauccugaugaacucauccuugg

SEQ ID NO: 68169 - RNA, 23 nt, Artificial Sequence
  Chemically synthesized
auccugaugaacucauccuugga

SEQ ID NO: 68170 - RNA, 23 nt, Artificial Sequence
  Chemically synthesized
uccugaugaacucauccuuggaa

SEQ ID NO: 68171 - RNA, 23 nt, Artificial Sequence
  Chemically synthesized
ccugaugaacucauccuuggaaa

SEQ ID NO: 68172 - RNA, 23 nt, Artificial Sequence
  Chemically synthesized
cugaugaacucauccuuggaaau

SEQ ID NO: 68173 - RNA, 23 nt, Artificial Sequence
  Chemically synthesized
guugauaacagcgaccagcacgu

SEQ ID NO: 68174 - RNA, 23 nt, Artificial Sequence
  Chemically synthesized
uugauaacagcgaccagcacguc

SEQ ID NO: 68175 - RNA, 23 nt, Artificial Sequence
  Chemically synthesized
ugauaacagcgaccagcacgucc

SEQ ID NO: 68176 - RNA, 23 nt, Artificial Sequence
  Chemically synthesized
gauaacagcgaccagcacguccu

SEQ ID NO: 68177 - RNA, 23 nt, Artificial Sequence
  Chemically synthesized
auaacagcgaccagcacguccug

SEQ ID NO: 68178 - RNA, 23 nt, Artificial Sequence
  Chemically synthesized
ccccuugagaugguguugcuaag

SEQ ID NO: 68179 - RNA, 23 nt, Artificial Sequence
  Chemically synthesized
cccuugagaugguguugcuaagg

SEQ ID NO: 68180 - RNA, 23 nt, Artificial Sequence
  Chemically synthesized
ccuugagaugguguugcuaaggu

SEQ ID NO: 68181 - RNA, 23 nt, Artificial Sequence
  Chemically synthesized
acauacagacaugcacacacaua

SEQ ID NO: 68182 - RNA, 23 nt, Artificial Sequence
  Chemically synthesized
ugaaguagaucuucuuacagaac

SEQ ID NO: 68183 - RNA, 23 nt, Artificial Sequence
  Chemically synthesized
caaacuuaugccacuccuggugg

SEQ ID NO: 68184 - RNA, 23 nt, Artificial Sequence
  Chemically synthesized
aaacuuaugccacuccugguggc

SEQ ID NO: 68185 - RNA, 23 nt, Artificial Sequence
  Chemically synthesized
ugaucuccaccuucuuccggcuc

SEQ ID NO: 68186 - RNA, 23 nt, Artificial Sequence
  Chemically synthesized
uagaaugucccaaaauggagacc

SEQ ID NO: 68187 - RNA, 23 nt, Artificial Sequence
  Chemically synthesized
agaaugucccaaaauggagaccc

SEQ ID NO: 68188 - RNA, 23 nt, Artificial Sequence
  Chemically synthesized
gaaugucccaaaauggagacccu

SEQ ID NO: 68189 - RNA, 23 nt, Artificial Sequence
  Chemically synthesized
aaugucccaaaauggagacccuu

SEQ ID NO: 68190 - RNA, 23 nt, Artificial Sequence
  Chemically synthesized
gagggacagaucauauccuggcu

SEQ ID NO: 68191 - RNA, 23 nt, Artificial Sequence
  Chemically synthesized
agggacagaucauauccuggcug

SEQ ID NO: 68192 - RNA, 23 nt, Artificial Sequence
  Chemically synthesized
gggacagaucauauccuggcuga

SEQ ID NO: 68193 - RNA, 23 nt, Artificial Sequence
  Chemically synthesized
ggacagaucauauccuggcugau

SEQ ID NO: 68194 - RNA, 23 nt, Artificial Sequence
  Chemically synthesized
cucgaugaaggaucucagcaucc

SEQ ID NO: 68195 - RNA, 23 nt, Artificial Sequence
  Chemically synthesized
ucgaugaaggaucucagcauccu

SEQ ID NO: 68196 - RNA, 23 nt, Artificial Sequence
  Chemically synthesized
cgaugaaggaucucagcauccug

SEQ ID NO: 68197 - RNA, 23 nt, Artificial Sequence
  Chemically synthesized
gaugaaggaucucagcauccuga

SEQ ID NO: 68198 - RNA, 23 nt, Artificial Sequence
  Chemically synthesized
augaaggaucucagcauccugau

SEQ ID NO: 68199 - RNA, 23 nt, Artificial Sequence
  Chemically synthesized
uccuuggaaaugaggccauuccc

SEQ ID NO: 68200 - RNA, 23 nt, Artificial Sequence
  Chemically synthesized
ccuuggaaaugaggccauuccca

SEQ ID NO: 68201 - RNA, 23 nt, Artificial Sequence
  Chemically synthesized
cuuggaaaugaggccauucccau

SEQ ID NO: 68202 - RNA, 23 nt, Artificial Sequence
  Chemically synthesized
uuggaaaugaggccauucccauc

SEQ ID NO: 68203 - RNA, 23 nt, Artificial Sequence
  Chemically synthesized
gcucuagccaggauaaguccugg

SEQ ID NO: 68204 - RNA, 23 nt, Artificial Sequence
  Chemically synthesized
cucuagccaggauaaguccuggu

SEQ ID NO: 68205 - RNA, 23 nt, Artificial Sequence
  Chemically synthesized
ucuagccaggauaaguccugguu

SEQ ID NO: 68206 - RNA, 23 nt, Artificial Sequence
  Chemically synthesized
cuagccaggauaaguccugguug

SEQ ID NO: 68207 - RNA, 23 nt, Artificial Sequence
  Chemically synthesized
uagccaggauaaguccugguugu

SEQ ID NO: 68208 - RNA, 23 nt, Artificial Sequence
  Chemically synthesized
agcucuggagacacuugaguucc

SEQ ID NO: 68209 - RNA, 23 nt, Artificial Sequence
  Chemically synthesized
gcucuggagacacuugaguuccg

SEQ ID NO: 68210 - RNA, 23 nt, Artificial Sequence
  Chemically synthesized
cucuggagacacuugaguuccga

SEQ ID NO: 68211 - RNA, 23 nt, Artificial Sequence
  Chemically synthesized
ucuggagacacuugaguuccgau

SEQ ID NO: 68212 - RNA, 23 nt, Artificial Sequence
  Chemically synthesized
ggagacacuugaguuccgauuga

SEQ ID NO: 68213 - RNA, 23 nt, Artificial Sequence
  Chemically synthesized
gagacacuugaguuccgauugau

SEQ ID NO: 68214 - RNA, 23 nt, Artificial Sequence
  Chemically synthesized
agacacuugaguuccgauugaug

SEQ ID NO: 68215 - RNA, 23 nt, Artificial Sequence
  Chemically synthesized
gacacuugaguuccgauugauga

SEQ ID NO: 68216 - RNA, 23 nt, Artificial Sequence
  Chemically synthesized
uuuauuuggaagggagacuacug

SEQ ID NO: 68217 - RNA, 23 nt, Artificial Sequence
  Chemically synthesized
ucugaugaaagaacgugcuuaaa

SEQ ID NO: 68218 - RNA, 23 nt, Artificial Sequence
  Chemically synthesized
guucuaagaugccagcauccaug

SEQ ID NO: 68219 - RNA, 23 nt, Artificial Sequence
  Chemically synthesized
ugugcuccaugagguuguuguac

SEQ ID NO: 68220 - RNA, 23 nt, Artificial Sequence
  Chemically synthesized
gugcuccaugagguuguuguacc

SEQ ID NO: 68221 - RNA, 23 nt, Artificial Sequence
  Chemically synthesized
ugcuccaugagguuguuguacca

SEQ ID NO: 68222 - RNA, 23 nt, Artificial Sequence
  Chemically synthesized
ugucuucugagauuuguuucuga

SEQ ID NO: 68223 - RNA, 23 nt, Artificial Sequence
  Chemically synthesized
gucuucugagauuuguuucugaa

SEQ ID NO: 68224 - RNA, 23 nt, Artificial Sequence
  Chemically synthesized
ucuucugagauuuguuucugaag

SEQ ID NO: 68225 - RNA, 23 nt, Artificial Sequence
  Chemically synthesized
cuucugagauuuguuucugaagu

SEQ ID NO: 68226 - RNA, 23 nt, Artificial Sequence
  Chemically synthesized
uucugagauuuguuucugaaguc

SEQ ID NO: 68227 - RNA, 23 nt, Artificial Sequence
  Chemically synthesized
ugagguuguuguaccacccauca

SEQ ID NO: 68228 - RNA, 23 nt, Artificial Sequence
  Chemically synthesized
cuggaagugccgcucacagaugu

SEQ ID NO: 68229 - RNA, 23 nt, Artificial Sequence
  Chemically synthesized
uggaagugccgcucacagaugua

SEQ ID NO: 68230 - RNA, 23 nt, Artificial Sequence
  Chemically synthesized
ggaagugccgcucacagauguac

SEQ ID NO: 68231 - RNA, 23 nt, Artificial Sequence
  Chemically synthesized
gaagugccgcucacagauguaca

SEQ ID NO: 68232 - RNA, 23 nt, Artificial Sequence
  Chemically synthesized
aagugccgcucacagauguacag

SEQ ID NO: 68233 - RNA, 23 nt, Artificial Sequence
  Chemically synthesized
uugaggaagguuucucgcaggaa

SEQ ID NO: 68234 - RNA, 23 nt, Artificial Sequence
  Chemically synthesized
gguuucucgcaggaaggugauga

SEQ ID NO: 68235 - RNA, 23 nt, Artificial Sequence
  Chemically synthesized
guuucucgcaggaaggugaugag

SEQ ID NO: 68236 - RNA, 23 nt, Artificial Sequence
  Chemically synthesized
uuucucgcaggaaggugaugagg

SEQ ID NO: 68237 - RNA, 23 nt, Artificial Sequence
  Chemically synthesized
uucucgcaggaaggugaugaggu

SEQ ID NO: 68238 - RNA, 23 nt, Artificial Sequence
  Chemically synthesized
ucucgcaggaaggugaugagguu

SEQ ID NO: 68239 - RNA, 23 nt, Artificial Sequence
  Chemically synthesized
gagcaagauguaggagaacauga

SEQ ID NO: 68240 - RNA, 23 nt, Artificial Sequence
  Chemically synthesized
agcaagauguaggagaacaugaa

SEQ ID NO: 68241 - RNA, 23 nt, Artificial Sequence
  Chemically synthesized
gcaagauguaggagaacaugaaa

SEQ ID NO: 68242 - RNA, 23 nt, Artificial Sequence
  Chemically synthesized
caagauguaggagaacaugaaag

SEQ ID NO: 68243 - RNA, 23 nt, Artificial Sequence
  Chemically synthesized
augucccaaaauggagacccuuc

SEQ ID NO: 68244 - RNA, 23 nt, Artificial Sequence
  Chemically synthesized
ccgguaguucucaaugaagcgcu

SEQ ID NO: 68245 - RNA, 23 nt, Artificial Sequence
  Chemically synthesized
cgguaguucucaaugaagcgcuu

SEQ ID NO: 68246 - RNA, 23 nt, Artificial Sequence
  Chemically synthesized
gguaguucucaaugaagcgcuug

SEQ ID NO: 68247 - RNA, 23 nt, Artificial Sequence
  Chemically synthesized
gcagcaccaggucauacuccuug

SEQ ID NO: 68248 - RNA, 23 nt, Artificial Sequence
  Chemically synthesized
cagcaccaggucauacuccuugg

SEQ ID NO: 68249 - RNA, 23 nt, Artificial Sequence
  Chemically synthesized
agcaccaggucauacuccuuggg

SEQ ID NO: 68250 - RNA, 23 nt, Artificial Sequence
  Chemically synthesized
gcaccaggucauacuccuugggg

SEQ ID NO: 68251 - RNA, 23 nt, Artificial Sequence
  Chemically synthesized
caccaggucauacuccuugggga

SEQ ID NO: 68252 - RNA, 23 nt, Artificial Sequence
  Chemically synthesized
caggacgaaguugaccuucugug

SEQ ID NO: 68253 - RNA, 23 nt, Artificial Sequence
  Chemically synthesized
aggacgaaguugaccuucugugg

SEQ ID NO: 68254 - RNA, 23 nt, Artificial Sequence
  Chemically synthesized
ggacgaaguugaccuucugugga

SEQ ID NO: 68255 - RNA, 23 nt, Artificial Sequence
  Chemically synthesized
gccauuccaaagcuuccaugccu

SEQ ID NO: 68256 - RNA, 23 nt, Artificial Sequence
  Chemically synthesized
ccauuccaaagcuuccaugccuc

SEQ ID NO: 68257 - RNA, 23 nt, Artificial Sequence
  Chemically synthesized
cauuccaaagcuuccaugccucc

SEQ ID NO: 68258 - RNA, 23 nt, Artificial Sequence
  Chemically synthesized
auuccaaagcuuccaugccuccc

SEQ ID NO: 68259 - RNA, 23 nt, Artificial Sequence
  Chemically synthesized
uuccaaagcuuccaugccuccca

SEQ ID NO: 68260 - RNA, 23 nt, Artificial Sequence
  Chemically synthesized
cccauuccugguguucucaaacc

SEQ ID NO: 68261 - RNA, 23 nt, Artificial Sequence
  Chemically synthesized
ccauuccugguguucucaaacca

SEQ ID NO: 68262 - RNA, 23 nt, Artificial Sequence
  Chemically synthesized
cauuccugguguucucaaaccag

SEQ ID NO: 68263 - RNA, 23 nt, Artificial Sequence
  Chemically synthesized
auuccugguguucucaaaccagu

SEQ ID NO: 68264 - RNA, 23 nt, Artificial Sequence
  Chemically synthesized
uuccugguguucucaaaccagua

SEQ ID NO: 68265 - RNA, 23 nt, Artificial Sequence
  Chemically synthesized
uguucucaaaccaguagcgguca

SEQ ID NO: 68266 - RNA, 23 nt, Artificial Sequence
  Chemically synthesized
aggauaaguccugguuguacagg

SEQ ID NO: 68267 - RNA, 23 nt, Artificial Sequence
  Chemically synthesized
cggguaaugggagacaagcccag

SEQ ID NO: 68268 - RNA, 23 nt, Artificial Sequence
  Chemically synthesized
ggguaaugggagacaagcccagu

SEQ ID NO: 68269 - RNA, 23 nt, Artificial Sequence
  Chemically synthesized
gguaaugggagacaagcccagug

SEQ ID NO: 68270 - RNA, 23 nt, Artificial Sequence
  Chemically synthesized
guaaugggagacaagcccagugc

SEQ ID NO: 68271 - RNA, 23 nt, Artificial Sequence
  Chemically synthesized
uaaugggagacaagcccagugcu

SEQ ID NO: 68272 - RNA, 23 nt, Artificial Sequence
  Chemically synthesized
caaccaacacaugguccucucgc

SEQ ID NO: 68273 - RNA, 23 nt, Artificial Sequence
  Chemically synthesized
gcagugcauccacaucuucagca

SEQ ID NO: 68274 - RNA, 23 nt, Artificial Sequence
  Chemically synthesized
cagugcauccacaucuucagcac

SEQ ID NO: 68275 - RNA, 23 nt, Artificial Sequence
  Chemically synthesized
agugcauccacaucuucagcacu

SEQ ID NO: 68276 - RNA, 23 nt, Artificial Sequence
  Chemically synthesized
gugcauccacaucuucagcacuu

SEQ ID NO: 68277 - RNA, 23 nt, Artificial Sequence
  Chemically synthesized
ugcauccacaucuucagcacuuu

SEQ ID NO: 68278 - RNA, 23 nt, Artificial Sequence
  Chemically synthesized
uguauacuccgggaguguuuucu

SEQ ID NO: 68279 - RNA, 23 nt, Artificial Sequence
  Chemically synthesized
guauacuccgggaguguuuucug

SEQ ID NO: 68280 - RNA, 23 nt, Artificial Sequence
  Chemically synthesized
uauacuccgggaguguuuucugc

SEQ ID NO: 68281 - RNA, 23 nt, Artificial Sequence
  Chemically synthesized
auacuccgggaguguuuucugca

SEQ ID NO: 68282 - RNA, 23 nt, Artificial Sequence
  Chemically synthesized
uacuccgggaguguuuucugcag

SEQ ID NO: 68283 - RNA, 23 nt, Artificial Sequence
  Chemically synthesized
acauagguauugggccagggucu

SEQ ID NO: 68284 - RNA, 23 nt, Artificial Sequence
  Chemically synthesized
ucugagauuuguuucugaagucu

SEQ ID NO: 68285 - RNA, 23 nt, Artificial Sequence
  Chemically synthesized
cugagauuuguuucugaagucug

SEQ ID NO: 68286 - RNA, 23 nt, Artificial Sequence
  Chemically synthesized
ccacacauggugacugacuaugg

SEQ ID NO: 68287 - RNA, 23 nt, Artificial Sequence
  Chemically synthesized
cacacauggugacugacuauggc

SEQ ID NO: 68288 - RNA, 23 nt, Artificial Sequence
  Chemically synthesized
acacauggugacugacuauggcc

SEQ ID NO: 68289 - RNA, 23 nt, Artificial Sequence
  Chemically synthesized
cacauggugacugacuauggcca

SEQ ID NO: 68290 - RNA, 23 nt, Artificial Sequence
  Chemically synthesized
acauggugacugacuauggccac

SEQ ID NO: 68291 - RNA, 23 nt, Artificial Sequence
  Chemically synthesized
cauggugacugacuauggccacc

SEQ ID NO: 68292 - RNA, 23 nt, Artificial Sequence
  Chemically synthesized
gaguugaagaagggcucaaaggg

SEQ ID NO: 68293 - RNA, 23 nt, Artificial Sequence
  Chemically synthesized
aguugaagaagggcucaaagggg

SEQ ID NO: 68294 - RNA, 23 nt, Artificial Sequence
  Chemically synthesized
guugaagaagggcucaaaggggg

SEQ ID NO: 68295 - RNA, 23 nt, Artificial Sequence
  Chemically synthesized
uugaagaagggcucaaagggggg

SEQ ID NO: 68296 - RNA, 23 nt, Artificial Sequence
  Chemically synthesized
ugaagaagggcucaaagggggga

SEQ ID NO: 68297 - RNA, 23 nt, Artificial Sequence
  Chemically synthesized
ccgcucacagauguacagcauag

SEQ ID NO: 68298 - RNA, 23 nt, Artificial Sequence
  Chemically synthesized
cgcucacagauguacagcauagu

SEQ ID NO: 68299 - RNA, 23 nt, Artificial Sequence
  Chemically synthesized
gcucacagauguacagcauagug

SEQ ID NO: 68300 - RNA, 23 nt, Artificial Sequence
  Chemically synthesized
guggucauucuccuccaccucuc

SEQ ID NO: 68301 - RNA, 23 nt, Artificial Sequence
  Chemically synthesized
uggucauucuccuccaccucucg

SEQ ID NO: 68302 - RNA, 23 nt, Artificial Sequence
  Chemically synthesized
ggucauucuccuccaccucucgg

SEQ ID NO: 68303 - RNA, 23 nt, Artificial Sequence
  Chemically synthesized
gucauucuccuccaccucucgga

SEQ ID NO: 68304 - RNA, 23 nt, Artificial Sequence
  Chemically synthesized
ucauucuccuccaccucucggau

SEQ ID NO: 68305 - RNA, 23 nt, Artificial Sequence
  Chemically synthesized
uacagaacacuuggcagcugacg

SEQ ID NO: 68306 - RNA, 23 nt, Artificial Sequence
  Chemically synthesized
accaccaguaauacuucuggggg

SEQ ID NO: 68307 - RNA, 23 nt, Artificial Sequence
  Chemically synthesized
ccaccaguaauacuucuggggga

SEQ ID NO: 68308 - RNA, 23 nt, Artificial Sequence
  Chemically synthesized
caccaguaauacuucugggggag

SEQ ID NO: 68309 - RNA, 23 nt, Artificial Sequence
  Chemically synthesized
ggggcucagggauuagaaugucc

SEQ ID NO: 68310 - RNA, 23 nt, Artificial Sequence
  Chemically synthesized
gggcucagggauuagaauguccc

SEQ ID NO: 68311 - RNA, 23 nt, Artificial Sequence
  Chemically synthesized
ggcucagggauuagaauguccca

SEQ ID NO: 68312 - RNA, 23 nt, Artificial Sequence
  Chemically synthesized
gcucagggauuagaaugucccaa

SEQ ID NO: 68313 - RNA, 23 nt, Artificial Sequence
  Chemically synthesized
cucagggauuagaaugucccaaa

SEQ ID NO: 68314 - RNA, 23 nt, Artificial Sequence
  Chemically synthesized
uacacauucaccacauggcccac

SEQ ID NO: 68315 - RNA, 23 nt, Artificial Sequence
  Chemically synthesized
gcggcaaaggcguaguaguaggc

SEQ ID NO: 68316 - RNA, 23 nt, Artificial Sequence
  Chemically synthesized
cggcaaaggcguaguaguaggcc

SEQ ID NO: 68317 - RNA, 23 nt, Artificial Sequence
  Chemically synthesized
ggcaaaggcguaguaguaggccc

SEQ ID NO: 68318 - RNA, 23 nt, Artificial Sequence
  Chemically synthesized
gcaaaggcguaguaguaggcccu

SEQ ID NO: 68319 - RNA, 23 nt, Artificial Sequence
  Chemically synthesized
caaaggcguaguaguaggcccuc

SEQ ID NO: 68320 - RNA, 23 nt, Artificial Sequence
  Chemically synthesized
aaaggcguaguaguaggcccucu

SEQ ID NO: 68321 - RNA, 23 nt, Artificial Sequence
  Chemically synthesized
gacagaucauauccuggcugaug

SEQ ID NO: 68322 - RNA, 23 nt, Artificial Sequence
  Chemically synthesized
gagguccuugaugacuucaggca

SEQ ID NO: 68323 - RNA, 23 nt, Artificial Sequence
  Chemically synthesized
agguccuugaugacuucaggcac

SEQ ID NO: 68324 - RNA, 23 nt, Artificial Sequence
  Chemically synthesized
gguccuugaugacuucaggcacc

SEQ ID NO: 68325 - RNA, 23 nt, Artificial Sequence
  Chemically synthesized
guccuugaugacuucaggcaccu

SEQ ID NO: 68326 - RNA, 23 nt, Artificial Sequence
  Chemically synthesized
uccuugaugacuucaggcaccuc

SEQ ID NO: 68327 - RNA, 23 nt, Artificial Sequence
  Chemically synthesized
acaugcggaacauaaggcgagac

SEQ ID NO: 68328 - RNA, 23 nt, Artificial Sequence
  Chemically synthesized
uaaggcgagacuuuuccucagga

SEQ ID NO: 68329 - RNA, 23 nt, Artificial Sequence
  Chemically synthesized
accaggucauacuccuuggggau

SEQ ID NO: 68330 - RNA, 23 nt, Artificial Sequence
  Chemically synthesized
aguugaccuucuguggaggcugc

SEQ ID NO: 68331 - RNA, 23 nt, Artificial Sequence
  Chemically synthesized
guugaccuucuguggaggcugca

SEQ ID NO: 68332 - RNA, 23 nt, Artificial Sequence
  Chemically synthesized
uugaccuucuguggaggcugcag

SEQ ID NO: 68333 - RNA, 23 nt, Artificial Sequence
  Chemically synthesized
aacaauccaggcacugagcaggc

SEQ ID NO: 68334 - RNA, 23 nt, Artificial Sequence
  Chemically synthesized
gggucaauguugauaacagcgac

SEQ ID NO: 68335 - RNA, 23 nt, Artificial Sequence
  Chemically synthesized
gcacuuuguaggcuugggugcuc

SEQ ID NO: 68336 - RNA, 23 nt, Artificial Sequence
  Chemically synthesized
cuggagacacuugaguuccgauu

SEQ ID NO: 68337 - RNA, 23 nt, Artificial Sequence
  Chemically synthesized
uggagacacuugaguuccgauug

SEQ ID NO: 68338 - RNA, 23 nt, Artificial Sequence
  Chemically synthesized
ucauacacagcgauguucuggua

SEQ ID NO: 68339 - RNA, 23 nt, Artificial Sequence
  Chemically synthesized
cauacacagcgauguucugguag

SEQ ID NO: 68340 - RNA, 23 nt, Artificial Sequence
  Chemically synthesized
auacacagcgauguucugguagg

SEQ ID NO: 68341 - RNA, 23 nt, Artificial Sequence
  Chemically synthesized
uacacagcgauguucugguaggu

SEQ ID NO: 68342 - RNA, 23 nt, Artificial Sequence
  Chemically synthesized
ggccagggucugaugaaagaacg

SEQ ID NO: 68343 - RNA, 23 nt, Artificial Sequence
  Chemically synthesized
gccagggucugaugaaagaacgu

SEQ ID NO: 68344 - RNA, 23 nt, Artificial Sequence
  Chemically synthesized
ccagggucugaugaaagaacgug

SEQ ID NO: 68345 - RNA, 23 nt, Artificial Sequence
  Chemically synthesized
ggaguagggaggguucuaagaug

SEQ ID NO: 68346 - RNA, 23 nt, Artificial Sequence
  Chemically synthesized
cuugucuucugagauuuguuucu

SEQ ID NO: 68347 - RNA, 23 nt, Artificial Sequence
  Chemically synthesized
uugucuucugagauuuguuucug

SEQ ID NO: 68348 - RNA, 23 nt, Artificial Sequence
  Chemically synthesized
aggcugagacacauccugguccu

SEQ ID NO: 68349 - RNA, 23 nt, Artificial Sequence
  Chemically synthesized
ggcugagacacauccugguccug

SEQ ID NO: 68350 - RNA, 23 nt, Artificial Sequence
  Chemically synthesized
gcugagacacauccugguccugg

SEQ ID NO: 68351 - RNA, 23 nt, Artificial Sequence
  Chemically synthesized
cugagacacauccugguccuggg

SEQ ID NO: 68352 - RNA, 23 nt, Artificial Sequence
  Chemically synthesized
ugagacacauccugguccugggg

SEQ ID NO: 68353 - RNA, 23 nt, Artificial Sequence
  Chemically synthesized
ggcugaggcagccagaaauagga

SEQ ID NO: 68354 - RNA, 23 nt, Artificial Sequence
  Chemically synthesized
gcugaggcagccagaaauaggaa

SEQ ID NO: 68355 - RNA, 23 nt, Artificial Sequence
  Chemically synthesized
cugaggcagccagaaauaggaag

SEQ ID NO: 68356 - RNA, 23 nt, Artificial Sequence
  Chemically synthesized
ugaggcagccagaaauaggaaga

SEQ ID NO: 68357 - RNA, 23 nt, Artificial Sequence
  Chemically synthesized
gaggcagccagaaauaggaagaa

SEQ ID NO: 68358 - RNA, 23 nt, Artificial Sequence
  Chemically synthesized
cugccuguugaugagcugacagg

SEQ ID NO: 68359 - RNA, 23 nt, Artificial Sequence
  Chemically synthesized
ugccuguugaugagcugacaggc

SEQ ID NO: 68360 - RNA, 23 nt, Artificial Sequence
  Chemically synthesized
gccuguugaugagcugacaggcc

SEQ ID NO: 68361 - RNA, 23 nt, Artificial Sequence
  Chemically synthesized
ggccuuuuccacauucuugguca

SEQ ID NO: 68362 - RNA, 23 nt, Artificial Sequence
  Chemically synthesized
gccuuuuccacauucuuggucau

SEQ ID NO: 68363 - RNA, 23 nt, Artificial Sequence
  Chemically synthesized
ccuuuuccacauucuuggucaug

SEQ ID NO: 68364 - RNA, 23 nt, Artificial Sequence
  Chemically synthesized
cuuuuccacauucuuggucaugc

SEQ ID NO: 68365 - RNA, 23 nt, Artificial Sequence
  Chemically synthesized
uuuuccacauucuuggucaugcc

SEQ ID NO: 68366 - RNA, 23 nt, Artificial Sequence
  Chemically synthesized
ugacuugaagaccaggucuuuga

SEQ ID NO: 68367 - RNA, 23 nt, Artificial Sequence
  Chemically synthesized
gacuugaagaccaggucuuugag

SEQ ID NO: 68368 - RNA, 23 nt, Artificial Sequence
  Chemically synthesized
acuugaagaccaggucuuugagg

SEQ ID NO: 68369 - RNA, 23 nt, Artificial Sequence
  Chemically synthesized
cuugaagaccaggucuuugagga

SEQ ID NO: 68370 - RNA, 23 nt, Artificial Sequence
  Chemically synthesized
uugaagaccaggucuuugaggau

SEQ ID NO: 68371 - RNA, 23 nt, Artificial Sequence
  Chemically synthesized
accagaaguguccaugcuagagc

SEQ ID NO: 68372 - RNA, 23 nt, Artificial Sequence
  Chemically synthesized
ccagaaguguccaugcuagagcc

SEQ ID NO: 68373 - RNA, 23 nt, Artificial Sequence
  Chemically synthesized
cagaaguguccaugcuagagcca

SEQ ID NO: 68374 - RNA, 23 nt, Artificial Sequence
  Chemically synthesized
agaaguguccaugcuagagccag

SEQ ID NO: 68375 - RNA, 23 nt, Artificial Sequence
  Chemically synthesized
gaaguguccaugcuagagccagg

SEQ ID NO: 68376 - RNA, 23 nt, Artificial Sequence
  Chemically synthesized
aaguguccaugcuagagccaggc

SEQ ID NO: 68377 - RNA, 23 nt, Artificial Sequence
  Chemically synthesized
aaugguccaucaagguacagcuu

SEQ ID NO: 68378 - RNA, 23 nt, Artificial Sequence
  Chemically synthesized
augguccaucaagguacagcuuu

SEQ ID NO: 68379 - RNA, 23 nt, Artificial Sequence
  Chemically synthesized
ugguccaucaagguacagcuuug

SEQ ID NO: 68380 - RNA, 23 nt, Artificial Sequence
  Chemically synthesized
gguccaucaagguacagcuuugg

SEQ ID NO: 68381 - RNA, 23 nt, Artificial Sequence
  Chemically synthesized
guccaucaagguacagcuuuggg

SEQ ID NO: 68382 - RNA, 23 nt, Artificial Sequence
  Chemically synthesized
uccaucaagguacagcuuugggu

SEQ ID NO: 68383 - RNA, 23 nt, Artificial Sequence
  Chemically synthesized
ccaucaagguacagcuuugggua

SEQ ID NO: 68384 - RNA, 23 nt, Artificial Sequence
  Chemically synthesized
caucaagguacagcuuuggguau

SEQ ID NO: 68385 - RNA, 23 nt, Artificial Sequence
  Chemically synthesized
ucagggauuagaaugucccaaaa

SEQ ID NO: 68386 - RNA, 23 nt, Artificial Sequence
  Chemically synthesized
gccgguaguucucaaugaagcgc

SEQ ID NO: 68387 - RNA, 23 nt, Artificial Sequence
  Chemically synthesized
ugucccaaaauggagacccuuca

SEQ ID NO: 68388 - RNA, 23 nt, Artificial Sequence
  Chemically synthesized
aagcgcuugaacuguugcaccgu

SEQ ID NO: 68389 - RNA, 23 nt, Artificial Sequence
  Chemically synthesized
acagaucauauccuggcugaugu

SEQ ID NO: 68390 - RNA, 23 nt, Artificial Sequence
  Chemically synthesized
cagaucauauccuggcugaugua

SEQ ID NO: 68391 - RNA, 23 nt, Artificial Sequence
  Chemically synthesized
agaucauauccuggcugauguag

SEQ ID NO: 68392 - RNA, 23 nt, Artificial Sequence
  Chemically synthesized
gaucauauccuggcugauguagg

SEQ ID NO: 68393 - RNA, 23 nt, Artificial Sequence
  Chemically synthesized
aucauauccuggcugauguagga

SEQ ID NO: 68394 - RNA, 23 nt, Artificial Sequence
  Chemically synthesized
cgugaagcggagcucgcuauugu

SEQ ID NO: 68395 - RNA, 23 nt, Artificial Sequence
  Chemically synthesized
gugaagcggagcucgcuauugug

SEQ ID NO: 68396 - RNA, 23 nt, Artificial Sequence
  Chemically synthesized
ugaagcggagcucgcuauugugg

SEQ ID NO: 68397 - RNA, 23 nt, Artificial Sequence
  Chemically synthesized
gaagcggagcucgcuauuguggu

SEQ ID NO: 68398 - RNA, 23 nt, Artificial Sequence
  Chemically synthesized
aagcggagcucgcuauugugguc

SEQ ID NO: 68399 - RNA, 23 nt, Artificial Sequence
  Chemically synthesized
aucaaagucguacaugcggaaca

SEQ ID NO: 68400 - RNA, 23 nt, Artificial Sequence
  Chemically synthesized
acuuuuccucaggagagccuuuc

SEQ ID NO: 68401 - RNA, 23 nt, Artificial Sequence
  Chemically synthesized
cuuuuccucaggagagccuuuca

SEQ ID NO: 68402 - RNA, 23 nt, Artificial Sequence
  Chemically synthesized
uuuuccucaggagagccuuucau

SEQ ID NO: 68403 - RNA, 23 nt, Artificial Sequence
  Chemically synthesized
uuuccucaggagagccuuucaug

SEQ ID NO: 68404 - RNA, 23 nt, Artificial Sequence
  Chemically synthesized
uuccucaggagagccuuucauga

SEQ ID NO: 68405 - RNA, 23 nt, Artificial Sequence
  Chemically synthesized
cuucuuggagaacagcccauucc

SEQ ID NO: 68406 - RNA, 23 nt, Artificial Sequence
  Chemically synthesized
uucuuggagaacagcccauuccu

SEQ ID NO: 68407 - RNA, 23 nt, Artificial Sequence
  Chemically synthesized
ucuuggagaacagcccauuccug

SEQ ID NO: 68408 - RNA, 23 nt, Artificial Sequence
  Chemically synthesized
cuuggagaacagcccauuccugg

SEQ ID NO: 68409 - RNA, 23 nt, Artificial Sequence
  Chemically synthesized
uuggagaacagcccauuccuggu

SEQ ID NO: 68410 - RNA, 23 nt, Artificial Sequence
  Chemically synthesized
cgccacgaacucugaggagaugc

SEQ ID NO: 68411 - RNA, 23 nt, Artificial Sequence
  Chemically synthesized
gccacgaacucugaggagaugcu

SEQ ID NO: 68412 - RNA, 23 nt, Artificial Sequence
  Chemically synthesized
ccacgaacucugaggagaugcug

SEQ ID NO: 68413 - RNA, 23 nt, Artificial Sequence
  Chemically synthesized
auggccgguauccuguauacucc

SEQ ID NO: 68414 - RNA, 23 nt, Artificial Sequence
  Chemically synthesized
uggccgguauccuguauacuccg

SEQ ID NO: 68415 - RNA, 23 nt, Artificial Sequence
  Chemically synthesized
ggccgguauccuguauacuccgg

SEQ ID NO: 68416 - RNA, 23 nt, Artificial Sequence
  Chemically synthesized
gccgguauccuguauacuccggg

SEQ ID NO: 68417 - RNA, 23 nt, Artificial Sequence
  Chemically synthesized
ccgguauccuguauacuccggga

SEQ ID NO: 68418 - RNA, 23 nt, Artificial Sequence
  Chemically synthesized
cgguauccuguauacuccgggag

SEQ ID NO: 68419 - RNA, 23 nt, Artificial Sequence
  Chemically synthesized
gguauccuguauacuccgggagu

SEQ ID NO: 68420 - RNA, 23 nt, Artificial Sequence
  Chemically synthesized
guauccuguauacuccgggagug

SEQ ID NO: 68421 - RNA, 23 nt, Artificial Sequence
  Chemically synthesized
ugcgaggaaccauagauggcgcu

SEQ ID NO: 68422 - RNA, 23 nt, Artificial Sequence
  Chemically synthesized
ugcgaauguugaggaacucggcg

SEQ ID NO: 68423 - RNA, 23 nt, Artificial Sequence
  Chemically synthesized
gcgaauguugaggaacucggcgg

SEQ ID NO: 68424 - RNA, 23 nt, Artificial Sequence
  Chemically synthesized
cgaauguugaggaacucggcggg

SEQ ID NO: 68425 - RNA, 23 nt, Artificial Sequence
  Chemically synthesized
gaauguugaggaacucggcgggg

SEQ ID NO: 68426 - RNA, 23 nt, Artificial Sequence
  Chemically synthesized
aauguugaggaacucggcggggc

SEQ ID NO: 68427 - RNA, 23 nt, Artificial Sequence
  Chemically synthesized
cgugcuuaaaaccuugggugaaa

SEQ ID NO: 68428 - RNA, 23 nt, Artificial Sequence
  Chemically synthesized
gugcuuaaaaccuugggugaaau

SEQ ID NO: 68429 - RNA, 23 nt, Artificial Sequence
  Chemically synthesized
ucugaagucuggaagcagagguu

SEQ ID NO: 68430 - RNA, 23 nt, Artificial Sequence
  Chemically synthesized
cugaagucuggaagcagagguuu

SEQ ID NO: 68431 - RNA, 23 nt, Artificial Sequence
  Chemically synthesized
ugaagucuggaagcagagguuuc

SEQ ID NO: 68432 - RNA, 23 nt, Artificial Sequence
  Chemically synthesized
gaagucuggaagcagagguuuca

SEQ ID NO: 68433 - RNA, 23 nt, Artificial Sequence
  Chemically synthesized
aagucuggaagcagagguuucac

SEQ ID NO: 68434 - RNA, 23 nt, Artificial Sequence
  Chemically synthesized
ggccaccuggaacaagguuggga

SEQ ID NO: 68435 - RNA, 23 nt, Artificial Sequence
  Chemically synthesized
gccaccuggaacaagguugggag

SEQ ID NO: 68436 - RNA, 23 nt, Artificial Sequence
  Chemically synthesized
ccaccuggaacaagguugggagg

SEQ ID NO: 68437 - RNA, 23 nt, Artificial Sequence
  Chemically synthesized
caccuggaacaagguugggaggu

SEQ ID NO: 68438 - RNA, 23 nt, Artificial Sequence
  Chemically synthesized
accuggaacaagguugggaggug

SEQ ID NO: 68439 - RNA, 23 nt, Artificial Sequence
  Chemically synthesized
guucagaaccuucuggaagugcc

SEQ ID NO: 68440 - RNA, 23 nt, Artificial Sequence
  Chemically synthesized
uucagaaccuucuggaagugccg

SEQ ID NO: 68441 - RNA, 23 nt, Artificial Sequence
  Chemically synthesized
ucagaaccuucuggaagugccgc

SEQ ID NO: 68442 - RNA, 23 nt, Artificial Sequence
  Chemically synthesized
cagaaccuucuggaagugccgcu

SEQ ID NO: 68443 - RNA, 23 nt, Artificial Sequence
  Chemically synthesized
agaaccuucuggaagugccgcuc

SEQ ID NO: 68444 - RNA, 23 nt, Artificial Sequence
  Chemically synthesized
gauguagaugugcacagacacca

SEQ ID NO: 68445 - RNA, 23 nt, Artificial Sequence
  Chemically synthesized
auguagaugugcacagacaccag

SEQ ID NO: 68446 - RNA, 23 nt, Artificial Sequence
  Chemically synthesized
uguagaugugcacagacaccagg

SEQ ID NO: 68447 - RNA, 23 nt, Artificial Sequence
  Chemically synthesized
guagaugugcacagacaccaggu

SEQ ID NO: 68448 - RNA, 23 nt, Artificial Sequence
  Chemically synthesized
uagaugugcacagacaccagguc

SEQ ID NO: 68449 - RNA, 23 nt, Artificial Sequence
  Chemically synthesized
aacuuaugccacuccugguggcc

SEQ ID NO: 68450 - RNA, 23 nt, Artificial Sequence
  Chemically synthesized
acuuaugccacuccugguggccc

SEQ ID NO: 68451 - RNA, 23 nt, Artificial Sequence
  Chemically synthesized
aucaagguacagcuuuggguauc

SEQ ID NO: 68452 - RNA, 23 nt, Artificial Sequence
  Chemically synthesized
ccggaugugcaggcuaagcgugu

SEQ ID NO: 68453 - RNA, 23 nt, Artificial Sequence
  Chemically synthesized
cggaugugcaggcuaagcguguc

SEQ ID NO: 68454 - RNA, 23 nt, Artificial Sequence
  Chemically synthesized
ggaugugcaggcuaagcgugucc

SEQ ID NO: 68455 - RNA, 23 nt, Artificial Sequence
  Chemically synthesized
gaugugcaggcuaagcguguccu

SEQ ID NO: 68456 - RNA, 23 nt, Artificial Sequence
  Chemically synthesized
augugcaggcuaagcguguccuc

SEQ ID NO: 68457 - RNA, 23 nt, Artificial Sequence
  Chemically synthesized
cuggaucagggcaaagcuaccau

SEQ ID NO: 68458 - RNA, 23 nt, Artificial Sequence
  Chemically synthesized
uggaucagggcaaagcuaccaug

SEQ ID NO: 68459 - RNA, 23 nt, Artificial Sequence
  Chemically synthesized
ggaucagggcaaagcuaccaugg

SEQ ID NO: 68460 - RNA, 23 nt, Artificial Sequence
  Chemically synthesized
gaucagggcaaagcuaccaugga

SEQ ID NO: 68461 - RNA, 23 nt, Artificial Sequence
  Chemically synthesized
aucagggcaaagcuaccauggau

SEQ ID NO: 68462 - RNA, 23 nt, Artificial Sequence
  Chemically synthesized
augaggcgauggaaguccacggc

SEQ ID NO: 68463 - RNA, 23 nt, Artificial Sequence
  Chemically synthesized
ugaacuguugcaccgucuggugg

SEQ ID NO: 68464 - RNA, 23 nt, Artificial Sequence
  Chemically synthesized
gaacuguugcaccgucuggugga

SEQ ID NO: 68465 - RNA, 23 nt, Artificial Sequence
  Chemically synthesized
aacuguugcaccgucugguggag

SEQ ID NO: 68466 - RNA, 23 nt, Artificial Sequence
  Chemically synthesized
ugaaggaucucagcauccugaug

SEQ ID NO: 68467 - RNA, 23 nt, Artificial Sequence
  Chemically synthesized
gaaggaucucagcauccugauga

SEQ ID NO: 68468 - RNA, 23 nt, Artificial Sequence
  Chemically synthesized
aaggaucucagcauccugaugaa

SEQ ID NO: 68469 - RNA, 23 nt, Artificial Sequence
  Chemically synthesized
aaaggugccugaaaaaggucucc

SEQ ID NO: 68470 - RNA, 23 nt, Artificial Sequence
  Chemically synthesized
aaggugccugaaaaaggucucca

SEQ ID NO: 68471 - RNA, 23 nt, Artificial Sequence
  Chemically synthesized
aggugccugaaaaaggucuccag

SEQ ID NO: 68472 - RNA, 23 nt, Artificial Sequence
  Chemically synthesized
ggugccugaaaaaggucuccagg

SEQ ID NO: 68473 - RNA, 23 nt, Artificial Sequence
  Chemically synthesized
gugccugaaaaaggucuccagga

SEQ ID NO: 68474 - RNA, 23 nt, Artificial Sequence
  Chemically synthesized
uccaaagcuuccaugccucccac

SEQ ID NO: 68475 - RNA, 23 nt, Artificial Sequence
  Chemically synthesized
ccaaagcuuccaugccucccacg

SEQ ID NO: 68476 - RNA, 23 nt, Artificial Sequence
  Chemically synthesized
caaagcuuccaugccucccacga

SEQ ID NO: 68477 - RNA, 23 nt, Artificial Sequence
  Chemically synthesized
aaagcuuccaugccucccacgag

SEQ ID NO: 68478 - RNA, 23 nt, Artificial Sequence
  Chemically synthesized
auguugauaacagcgaccagcac

SEQ ID NO: 68479 - RNA, 23 nt, Artificial Sequence
  Chemically synthesized
guucucaaaccaguagcggucac

SEQ ID NO: 68480 - RNA, 23 nt, Artificial Sequence
  Chemically synthesized
caggauaaguccugguuguacag

SEQ ID NO: 68481 - RNA, 23 nt, Artificial Sequence
  Chemically synthesized
ccagcagcagugcauccacaucu

SEQ ID NO: 68482 - RNA, 23 nt, Artificial Sequence
  Chemically synthesized
cagcagcagugcauccacaucuu

SEQ ID NO: 68483 - RNA, 23 nt, Artificial Sequence
  Chemically synthesized
agcagcagugcauccacaucuuc

SEQ ID NO: 68484 - RNA, 23 nt, Artificial Sequence
  Chemically synthesized
gcagcagugcauccacaucuuca

SEQ ID NO: 68485 - RNA, 23 nt, Artificial Sequence
  Chemically synthesized
cagcagugcauccacaucuucag

SEQ ID NO: 68486 - RNA, 23 nt, Artificial Sequence
  Chemically synthesized
cuucagcacuuuguaggcuuggg

SEQ ID NO: 68487 - RNA, 23 nt, Artificial Sequence
  Chemically synthesized
uucagcacuuuguaggcuugggu

SEQ ID NO: 68488 - RNA, 23 nt, Artificial Sequence
  Chemically synthesized
ucagcacuuuguaggcuugggug

SEQ ID NO: 68489 - RNA, 23 nt, Artificial Sequence
  Chemically synthesized
cagcacuuuguaggcuugggugc

SEQ ID NO: 68490 - RNA, 23 nt, Artificial Sequence
  Chemically synthesized
agcacuuuguaggcuugggugcu

SEQ ID NO: 68491 - RNA, 23 nt, Artificial Sequence
  Chemically synthesized
gaugcgaauguugaggaacucgg

SEQ ID NO: 68492 - RNA, 23 nt, Artificial Sequence
  Chemically synthesized
augcgaauguugaggaacucggc

SEQ ID NO: 68493 - RNA, 23 nt, Artificial Sequence
  Chemically synthesized
caggucauacuccuuggggaucu

SEQ ID NO: 68494 - RNA, 23 nt, Artificial Sequence
  Chemically synthesized
aggucauacuccuuggggaucuu

SEQ ID NO: 68495 - RNA, 23 nt, Artificial Sequence
  Chemically synthesized
ggucauacuccuuggggaucuug

SEQ ID NO: 68496 - RNA, 23 nt, Artificial Sequence
  Chemically synthesized
gucauacuccuuggggaucuuga

SEQ ID NO: 68497 - RNA, 23 nt, Artificial Sequence
  Chemically synthesized
ucauacuccuuggggaucuugag

SEQ ID NO: 68498 - RNA, 23 nt, Artificial Sequence
  Chemically synthesized
caggucuuugaggauggaggcaa

SEQ ID NO: 68499 - RNA, 23 nt, Artificial Sequence
  Chemically synthesized
aggucuuugaggauggaggcaaa

SEQ ID NO: 68500 - RNA, 23 nt, Artificial Sequence
  Chemically synthesized
ggucuuugaggauggaggcaaaa

SEQ ID NO: 68501 - RNA, 23 nt, Artificial Sequence
  Chemically synthesized
gucuuugaggauggaggcaaaag

SEQ ID NO: 68502 - RNA, 23 nt, Artificial Sequence
  Chemically synthesized
ucuuugaggauggaggcaaaagg

SEQ ID NO: 68503 - RNA, 23 nt, Artificial Sequence
  Chemically synthesized
gcugcguuggaacuucucucggu

SEQ ID NO: 68504 - RNA, 23 nt, Artificial Sequence
  Chemically synthesized
cugcguuggaacuucucucggug

SEQ ID NO: 68505 - RNA, 23 nt, Artificial Sequence
  Chemically synthesized
ugcguuggaacuucucucggugc

SEQ ID NO: 68506 - RNA, 23 nt, Artificial Sequence
  Chemically synthesized
gcguuggaacuucucucggugcg

SEQ ID NO: 68507 - RNA, 23 nt, Artificial Sequence
  Chemically synthesized
cguuggaacuucucucggugcgc

SEQ ID NO: 68508 - RNA, 23 nt, Artificial Sequence
  Chemically synthesized
agggugguauuucggauuucuuc

SEQ ID NO: 68509 - RNA, 23 nt, Artificial Sequence
  Chemically synthesized
ugcagggugguauuucggauuuc

SEQ ID NO: 68510 - RNA, 23 nt, Artificial Sequence
  Chemically synthesized
auggcccacacuguguaagacug

SEQ ID NO: 68511 - RNA, 23 nt, Artificial Sequence
  Chemically synthesized
cugaggagcauugcauacauagg

SEQ ID NO: 68512 - RNA, 23 nt, Artificial Sequence
  Chemically synthesized
aacagcagcaccaggucauacuc

SEQ ID NO: 68513 - RNA, 23 nt, Artificial Sequence
  Chemically synthesized
aauccacugcccucaaaauaguc

SEQ ID NO: 68514 - RNA, 23 nt, Artificial Sequence
  Chemically synthesized
augucagccagccacucaaacug

SEQ ID NO: 68515 - RNA, 23 nt, Artificial Sequence
  Chemically synthesized
uuggcagcugacggaugacuuga

SEQ ID NO: 68516 - RNA, 23 nt, Artificial Sequence
  Chemically synthesized
aaggcgagacuuuuccucaggag

SEQ ID NO: 68517 - RNA, 23 nt, Artificial Sequence
  Chemically synthesized
augugcggcaaaggcguaguagu

SEQ ID NO: 68518 - RNA, 23 nt, Artificial Sequence
  Chemically synthesized
ucaugaagaccaccaggaugucc

SEQ ID NO: 68519 - RNA, 23 nt, Artificial Sequence
  Chemically synthesized
agccgcacaaauuguucaaggac

SEQ ID NO: 68520 - RNA, 23 nt, Artificial Sequence
  Chemically synthesized
ucagacccaucaucauggaagag

SEQ ID NO: 68521 - RNA, 23 nt, Artificial Sequence
  Chemically synthesized
cagacccaucaucauggaagagg

SEQ ID NO: 68522 - RNA, 23 nt, Artificial Sequence
  Chemically synthesized
uagugguccugaggucgaacuuc

SEQ ID NO: 68523 - RNA, 23 nt, Artificial Sequence
  Chemically synthesized
aaggcugaggcagccagaaauag

SEQ ID NO: 68524 - RNA, 23 nt, Artificial Sequence
  Chemically synthesized
cugacaggccuuuuccacauucu

SEQ ID NO: 68525 - RNA, 23 nt, Artificial Sequence
  Chemically synthesized
gacagcugcguuggaacuucucu

SEQ ID NO: 68526 - RNA, 23 nt, Artificial Sequence
  Chemically synthesized
aaucuccuucuuggagaacagcc

SEQ ID NO: 68527 - RNA, 23 nt, Artificial Sequence
  Chemically synthesized
uuucugaagucuggaagcagagg

SEQ ID NO: 68528 - RNA, 23 nt, Artificial Sequence
  Chemically synthesized
agacagcugcguuggaacuucuc

SEQ ID NO: 68529 - RNA, 23 nt, Artificial Sequence
  Chemically synthesized
uccugguguucucaaaccaguag

SEQ ID NO: 68530 - RNA, 23 nt, Artificial Sequence
  Chemically synthesized
uauggccaccuggaacaagguug

SEQ ID NO: 68531 - RNA, 23 nt, Artificial Sequence
  Chemically synthesized
auagacuccgguucagaaccuuc

SEQ ID NO: 68532 - RNA, 23 nt, Artificial Sequence
  Chemically synthesized
aggaagguuucucgcaggaaggu

SEQ ID NO: 68533 - RNA, 23 nt, Artificial Sequence
  Chemically synthesized
aacagcaagggcuggaaugacgu

SEQ ID NO: 68534 - RNA, 23 nt, Artificial Sequence
  Chemically synthesized
uauccuggcugauguaggaggcu

SEQ ID NO: 68535 - RNA, 23 nt, Artificial Sequence
  Chemically synthesized
aaagucguacaugcggaacauaa

SEQ ID NO: 68536 - RNA, 23 nt, Artificial Sequence
  Chemically synthesized
uucaugaagaccaccaggauguc

SEQ ID NO: 68537 - RNA, 23 nt, Artificial Sequence
  Chemically synthesized
auauccuggcugauguaggaggc

SEQ ID NO: 68538 - RNA, 23 nt, Artificial Sequence
  Chemically synthesized
uucucaaaccaguagcggucacc

SEQ ID NO: 68539 - RNA, 23 nt, Artificial Sequence
  Chemically synthesized
ggaugcgaauguugaggaacucg

SEQ ID NO: 68540 - RNA, 23 nt, Artificial Sequence
  Chemically synthesized
gaagcagagguuucacuuugccc

SEQ ID NO: 68541 - RNA, 23 nt, Artificial Sequence
  Chemically synthesized
aagguugggaggugggaaaucag

SEQ ID NO: 68542 - RNA, 23 nt, Artificial Sequence
  Chemically synthesized
aaggacgauggugcugaacagag

SEQ ID NO: 68543 - RNA, 23 nt, Artificial Sequence
  Chemically synthesized
ucuaccuccugcaaggcauuugc

SEQ ID NO: 68544 - RNA, 23 nt, Artificial Sequence
  Chemically synthesized
uaccuccugcaaggcauuugcca

SEQ ID NO: 68545 - RNA, 23 nt, Artificial Sequence
  Chemically synthesized
uuucuccaggcugagacacaucc

SEQ ID NO: 68546 - RNA, 23 nt, Artificial Sequence
  Chemically synthesized
augagcugacaggccuuuuccac

SEQ ID NO: 68547 - RNA, 23 nt, Artificial Sequence
  Chemically synthesized
cauauccuggcugauguaggagg

SEQ ID NO: 68548 - RNA, 23 nt, Artificial Sequence
  Chemically synthesized
uugaugacuucaggcaccuccac

SEQ ID NO: 68549 - RNA, 23 nt, Artificial Sequence
  Chemically synthesized
agccagagagaacauggacucca

SEQ ID NO: 68550 - RNA, 23 nt, Artificial Sequence
  Chemically synthesized
gaaaaggugccugaaaaaggucu

SEQ ID NO: 68551 - RNA, 23 nt, Artificial Sequence
  Chemically synthesized
aaagacauugggcugcagagcac

SEQ ID NO: 68552 - RNA, 23 nt, Artificial Sequence
  Chemically synthesized
aaagcacgugauagccaaagaag

SEQ ID NO: 68553 - RNA, 23 nt, Artificial Sequence
  Chemically synthesized
aagcacgugauagccaaagaaga

SEQ ID NO: 68554 - RNA, 23 nt, Artificial Sequence
  Chemically synthesized
uagacuccgguucagaaccuucu

SEQ ID NO: 68555 - RNA, 23 nt, Artificial Sequence
  Chemically synthesized
ucucugaggugucaacucagucu

SEQ ID NO: 68556 - RNA, 23 nt, Artificial Sequence
  Chemically synthesized
aagguacagcuuuggguaucugg

SEQ ID NO: 68557 - RNA, 23 nt, Artificial Sequence
  Chemically synthesized
uagaugauugcugggaccaggaa

SEQ ID NO: 68558 - RNA, 23 nt, Artificial Sequence
  Chemically synthesized
aucaucauggaagaggccaggaa

SEQ ID NO: 68559 - RNA, 23 nt, Artificial Sequence
  Chemically synthesized
aacagguacacauucaccacaug

SEQ ID NO: 68560 - RNA, 23 nt, Artificial Sequence
  Chemically synthesized
agagguccuugaugacuucaggc

SEQ ID NO: 68561 - RNA, 23 nt, Artificial Sequence
  Chemically synthesized
aaaugaggccauucccaucaaag

SEQ ID NO: 68562 - RNA, 23 nt, Artificial Sequence
  Chemically synthesized
aaugaggccauucccaucaaagu

SEQ ID NO: 68563 - RNA, 23 nt, Artificial Sequence
  Chemically synthesized
ucugugcgggaaaacuucagugg

SEQ ID NO: 68564 - RNA, 23 nt, Artificial Sequence
  Chemically synthesized
uauccuguauacuccgggagugu

SEQ ID NO: 68565 - RNA, 23 nt, Artificial Sequence
  Chemically synthesized
ugaugagcugacaggccuuuucc

SEQ ID NO: 68566 - RNA, 23 nt, Artificial Sequence
  Chemically synthesized
uggccuugccauuccaaagcuuc

SEQ ID NO: 68567 - RNA, 23 nt, Artificial Sequence
  Chemically synthesized
aucuccuucuuggagaacagccc

SEQ ID NO: 68568 - RNA, 23 nt, Artificial Sequence
  Chemically synthesized
gucugugcgggaaaacuucagug

SEQ ID NO: 68569 - RNA, 23 nt, Artificial Sequence
  Chemically synthesized
cagcuggcauuucucauguagac

SEQ ID NO: 68570 - RNA, 23 nt, Artificial Sequence
  Chemically synthesized
gaaauggccgguauccuguauac

SEQ ID NO: 68571 - RNA, 23 nt, Artificial Sequence
  Chemically synthesized
aauggccgguauccuguauacuc

SEQ ID NO: 68572 - RNA, 23 nt, Artificial Sequence
  Chemically synthesized
ucagcuugucuucugagauuugu

SEQ ID NO: 68573 - RNA, 23 nt, Artificial Sequence
  Chemically synthesized
ugguccugaggucgaacuucuca

SEQ ID NO: 68574 - RNA, 23 nt, Artificial Sequence
  Chemically synthesized
ugauguagaugugcacagacacc

SEQ ID NO: 68575 - RNA, 23 nt, Artificial Sequence
  Chemically synthesized
auacaugauggccaggaucagga

SEQ ID NO: 68576 - RNA, 23 nt, Artificial Sequence
  Chemically synthesized
uacaugauggccaggaucaggag

SEQ ID NO: 68577 - RNA, 23 nt, Artificial Sequence
  Chemically synthesized
acauggcccacacuguguaagac

SEQ ID NO: 68578 - RNA, 23 nt, Artificial Sequence
  Chemically synthesized
ucugaggugucaacucagucuca

SEQ ID NO: 68579 - RNA, 23 nt, Artificial Sequence
  Chemically synthesized
aucucagcauccugaugaacuca

SEQ ID NO: 68580 - RNA, 23 nt, Artificial Sequence
  Chemically synthesized
caggagagccuuucaugaagacc

SEQ ID NO: 68581 - RNA, 23 nt, Artificial Sequence
  Chemically synthesized
uggacaggacgaaguugaccuuc

SEQ ID NO: 68582 - RNA, 23 nt, Artificial Sequence
  Chemically synthesized
acaggacgaaguugaccuucugu

SEQ ID NO: 68583 - RNA, 23 nt, Artificial Sequence
  Chemically synthesized
cagcucuagccaggauaaguccu

SEQ ID NO: 68584 - RNA, 23 nt, Artificial Sequence
  Chemically synthesized
auagguauugggccagggucuga

SEQ ID NO: 68585 - RNA, 23 nt, Artificial Sequence
  Chemically synthesized
gucagcuugucuucugagauuug

SEQ ID NO: 68586 - RNA, 23 nt, Artificial Sequence
  Chemically synthesized
gaugagcugacaggccuuuucca

SEQ ID NO: 68587 - RNA, 23 nt, Artificial Sequence
  Chemically synthesized
gagcaggacauagagcaggaugu

SEQ ID NO: 68588 - RNA, 23 nt, Artificial Sequence
  Chemically synthesized
aguuccuccuuguccuggaaucc

SEQ ID NO: 68589 - RNA, 23 nt, Artificial Sequence
  Chemically synthesized
acgagcuucucagacacgaugcu

SEQ ID NO: 68590 - RNA, 23 nt, Artificial Sequence
  Chemically synthesized
agaacagcccauuccugguguuc

SEQ ID NO: 68591 - RNA, 23 nt, Artificial Sequence
  Chemically synthesized
ucuucagcacuuuguaggcuugg

SEQ ID NO: 68592 - RNA, 23 nt, Artificial Sequence
  Chemically synthesized
augacuugaagaccaggucuuug

SEQ ID NO: 68593 - RNA, 23 nt, Artificial Sequence
  Chemically synthesized
agguacagcuuuggguaucuggc

SEQ ID NO: 68594 - RNA, 23 nt, Artificial Sequence
  Chemically synthesized
cugcccugacuuguacucaaagc

SEQ ID NO: 68595 - RNA, 23 nt, Artificial Sequence
  Chemically synthesized
uacggucuggaagaaccaccagu

SEQ ID NO: 68596 - RNA, 23 nt, Artificial Sequence
  Chemically synthesized
ucaggagagccuuucaugaagac

SEQ ID NO: 68597 - RNA, 23 nt, Artificial Sequence
  Chemically synthesized
ucaccaaagggaagcaacagagg

SEQ ID NO: 68598 - RNA, 23 nt, Artificial Sequence
  Chemically synthesized
gaacagcccauuccugguguucu

SEQ ID NO: 68599 - RNA, 23 nt, Artificial Sequence
  Chemically synthesized
accauuucuccaggcugagacac

SEQ ID NO: 68600 - RNA, 23 nt, Artificial Sequence
  Chemically synthesized
aaauggccgguauccuguauacu

SEQ ID NO: 68601 - RNA, 23 nt, Artificial Sequence
  Chemically synthesized
ggaagcagagguuucacuuugcc

SEQ ID NO: 68602 - RNA, 23 nt, Artificial Sequence
  Chemically synthesized
uuccacauucuuggucaugccag

SEQ ID NO: 68603 - RNA, 23 nt, Artificial Sequence
  Chemically synthesized
augaggccauucccaucaaaguc

SEQ ID NO: 68604 - RNA, 23 nt, Artificial Sequence
  Chemically synthesized
agaaaaggugccugaaaaagguc

SEQ ID NO: 68605 - RNA, 23 nt, Artificial Sequence
  Chemically synthesized
gcuggcauuucucauguagacgc

SEQ ID NO: 68606 - RNA, 23 nt, Artificial Sequence
  Chemically synthesized
uuuccacauucuuggucaugcca

SEQ ID NO: 68607 - RNA, 23 nt, Artificial Sequence
  Chemically synthesized
uuugacacagagcugcgugaagc

SEQ ID NO: 68608 - RNA, 23 nt, Artificial Sequence
  Chemically synthesized
ucagcauccugaugaacucaucc

SEQ ID NO: 68609 - RNA, 23 nt, Artificial Sequence
  Chemically synthesized
cagcauccugaugaacucauccu

SEQ ID NO: 68610 - RNA, 23 nt, Artificial Sequence
  Chemically synthesized
augaagaccaccaggauguccag

SEQ ID NO: 68611 - RNA, 23 nt, Artificial Sequence
  Chemically synthesized
aaaaggugccugaaaaaggucuc

SEQ ID NO: 68612 - RNA, 23 nt, Artificial Sequence
  Chemically synthesized
aacacuuggcagcugacggauga

SEQ ID NO: 68613 - RNA, 23 nt, Artificial Sequence
  Chemically synthesized
aaaaaggucuccaggaggugccu

SEQ ID NO: 68614 - RNA, 23 nt, Artificial Sequence
  Chemically synthesized
caaucuccuucuuggagaacagc

SEQ ID NO: 68615 - RNA, 23 nt, Artificial Sequence
  Chemically synthesized
acacagcgauguucugguaggug

SEQ ID NO: 68616 - RNA, 23 nt, Artificial Sequence
  Chemically synthesized
cuugucaggucagcuugucuucu

SEQ ID NO: 68617 - RNA, 23 nt, Artificial Sequence
  Chemically synthesized
ucacucuagucccuagacacugc

SEQ ID NO: 68618 - RNA, 23 nt, Artificial Sequence
  Chemically synthesized
uagccauugccauccuugucagc

SEQ ID NO: 68619 - RNA, 23 nt, Artificial Sequence
  Chemically synthesized
uucaaucuccuucuuggagaaca

SEQ ID NO: 68620 - RNA, 23 nt, Artificial Sequence
  Chemically synthesized
gguucagaaccuucuggaagugc

SEQ ID NO: 68621 - RNA, 23 nt, Artificial Sequence
  Chemically synthesized
agaccaggucuuugaggauggag

SEQ ID NO: 68622 - RNA, 23 nt, Artificial Sequence
  Chemically synthesized
uaucuggcacaucugucacccgu

SEQ ID NO: 68623 - RNA, 23 nt, Artificial Sequence
  Chemically synthesized
ugaugagcaggacauagagcagg

SEQ ID NO: 68624 - RNA, 23 nt, Artificial Sequence
  Chemically synthesized
auguccaggaacucucggaagga

SEQ ID NO: 68625 - RNA, 23 nt, Artificial Sequence
  Chemically synthesized
acagguagccauugccauccuug

SEQ ID NO: 68626 - RNA, 23 nt, Artificial Sequence
  Chemically synthesized
uugucaggucagcuugucuucug

SEQ ID NO: 68627 - RNA, 23 nt, Artificial Sequence
  Chemically synthesized
ucacccagaugaaguagaucuuc

SEQ ID NO: 68628 - RNA, 23 nt, Artificial Sequence
  Chemically synthesized
cagguagccauugccauccuugu

SEQ ID NO: 68629 - RNA, 23 nt, Artificial Sequence
  Chemically synthesized
uucuccaggcugagacacauccu

SEQ ID NO: 68630 - RNA, 23 nt, Artificial Sequence
  Chemically synthesized
cacccagaugaaguagaucuucu

SEQ ID NO: 68631 - RNA, 23 nt, Artificial Sequence
  Chemically synthesized
aagaccaggucuuugaggaugga

SEQ ID NO: 68632 - RNA, 23 nt, Artificial Sequence
  Chemically synthesized
uugcugggaccaggaagaagaug

SEQ ID NO: 68633 - RNA, 23 nt, Artificial Sequence
  Chemically synthesized
uggagaucucgaugaaggaucuc

SEQ ID NO: 68634 - RNA, 23 nt, Artificial Sequence
  Chemically synthesized
uacuugucaggucagcuugucuu

SEQ ID NO: 68635 - RNA, 23 nt, Artificial Sequence
  Chemically synthesized
augagcaggacauagagcaggau

SEQ ID NO: 68636 - RNA, 23 nt, Artificial Sequence
  Chemically synthesized
uggaagcagagguuucacuuugc

SEQ ID NO: 68637 - RNA, 23 nt, Artificial Sequence
  Chemically synthesized
gaagaccaggucuuugaggaugg

SEQ ID NO: 68638 - RNA, 23 nt, Artificial Sequence
  Chemically synthesized
gaaguggcagcuggcauuucuca

SEQ ID NO: 68639 - RNA, 23 nt, Artificial Sequence
  Chemically synthesized
gacaggccuuuuccacauucuug

SEQ ID NO: 68640 - RNA, 23 nt, Artificial Sequence
  Chemically synthesized
auucuccuccaccucucggauga

SEQ ID NO: 68641 - RNA, 23 nt, Artificial Sequence
  Chemically synthesized
ccaggaagaagauguggaaacgg

SEQ ID NO: 68642 - RNA, 23 nt, Artificial Sequence
  Chemically synthesized
gucaggucagcuugucuucugag

SEQ ID NO: 68643 - RNA, 23 nt, Artificial Sequence
  Chemically synthesized
ugggaccaggaagaagaugugga

SEQ ID NO: 68644 - RNA, 23 nt, Artificial Sequence
  Chemically synthesized
ugcagucucugaggugucaacuc

SEQ ID NO: 68645 - RNA, 23 nt, Artificial Sequence
  Chemically synthesized
aggccuuuuccacauucuugguc

SEQ ID NO: 68646 - RNA, 23 nt, Artificial Sequence
  Chemically synthesized
acaggccuuuuccacauucuugg

SEQ ID NO: 68647 - RNA, 19 nt, Artificial Sequence
  Chemically synthesized
ccaacuacuaauagaauaa

SEQ ID NO: 68648 - RNA, 19 nt, Artificial Sequence
  Chemically synthesized
uuauucuauuaguaguugg

SEQ ID NO: 68649 - RNA, 19 nt, Artificial Sequence
  Chemically synthesized
ccuuuuucauuuaucuaua

SEQ ID NO: 68650 - RNA, 19 nt, Artificial Sequence
  Chemically synthesized
uauagauaaaugaaaaagg

SEQ ID NO: 68651 - RNA, 19 nt, Artificial Sequence
  Chemically synthesized
caacuacuaauagaauaaa

SEQ ID NO: 68652 - RNA, 19 nt, Artificial Sequence
  Chemically synthesized
uuuauucuauuaguaguug

SEQ ID NO: 68653 - RNA, 19 nt, Artificial Sequence
  Chemically synthesized
guguauugguuuuuuaaaa

SEQ ID NO: 68654 - RNA, 19 nt, Artificial Sequence
  Chemically synthesized
uuuuaaaaaaccaauacac

SEQ ID NO: 68655 - RNA, 19 nt, Artificial Sequence
  Chemically synthesized
ccaucauacccauccaagu

SEQ ID NO: 68656 - RNA, 19 nt, Artificial Sequence
  Chemically synthesized
gguugucagugaacaauaa

SEQ ID NO: 68657 - RNA, 19 nt, Artificial Sequence
  Chemically synthesized
gaauuaaaccaagacaaag

SEQ ID NO: 68658 - RNA, 19 nt, Artificial Sequence
  Chemically synthesized
ggauccaaguuuaaaaaga

SEQ ID NO: 68659 - RNA, 19 nt, Artificial Sequence
  Chemically synthesized
ggacauuuagcgugaugaa

SEQ ID NO: 68660 - RNA, 19 nt, Artificial Sequence
  Chemically synthesized
ccaugggaacuaaaccaaa

SEQ ID NO: 68661 - RNA, 19 nt, Artificial Sequence
  Chemically synthesized
cagggaagacgaagaugaa

SEQ ID NO: 68662 - RNA, 19 nt, Artificial Sequence
  Chemically synthesized
cauugugaguggaccaaga

SEQ ID NO: 68663 - RNA, 19 nt, Artificial Sequence
  Chemically synthesized
acuuccacccuucagaaaa

SEQ ID NO: 68664 - RNA, 19 nt, Artificial Sequence
  Chemically synthesized
caugggaacuaaaccaaaa

SEQ ID NO: 68665 - RNA, 19 nt, Artificial Sequence
  Chemically synthesized
acuuguggaggaaauugaa

SEQ ID NO: 68666 - RNA, 19 nt, Artificial Sequence
  Chemically synthesized
caacgauuuggaagucaga

SEQ ID NO: 68667 - RNA, 19 nt, Artificial Sequence
  Chemically synthesized
gagacuaagcaaugggaaa

SEQ ID NO: 68668 - RNA, 19 nt, Artificial Sequence
  Chemically synthesized
uuacuuccacccuucagaa

SEQ ID NO: 68669 - RNA, 19 nt, Artificial Sequence
  Chemically synthesized
cgagcgucgaagagacaaa

SEQ ID NO: 68670 - RNA, 19 nt, Artificial Sequence
  Chemically synthesized
ccuggugaauaucgaagaa

SEQ ID NO: 68671 - RNA, 19 nt, Artificial Sequence
  Chemically synthesized
gcuugaaagcgaugaagaa

SEQ ID NO: 68672 - RNA, 19 nt, Artificial Sequence
  Chemically synthesized
ugaugagcugcccaugaaa

SEQ ID NO: 68673 - RNA, 19 nt, Artificial Sequence
  Chemically synthesized
ccuacaaaaccaaaacaga

SEQ ID NO: 68674 - RNA, 19 nt, Artificial Sequence
  Chemically synthesized
gguacaguuugguguaaau

SEQ ID NO: 68675 - RNA, 19 nt, Artificial Sequence
  Chemically synthesized
ggaucaaguugaugaugga

SEQ ID NO: 68676 - RNA, 19 nt, Artificial Sequence
  Chemically synthesized
acccaagaauuaaaccaag

SEQ ID NO: 68677 - RNA, 19 nt, Artificial Sequence
  Chemically synthesized
agaucauagcugacuuuaa

SEQ ID NO: 68678 - RNA, 19 nt, Artificial Sequence
  Chemically synthesized
aaaggacaaacuugcguaa

SEQ ID NO: 68679 - RNA, 19 nt, Artificial Sequence
  Chemically synthesized
caaacuaaaggcucuaaaa

SEQ ID NO: 68680 - RNA, 19 nt, Artificial Sequence
  Chemically synthesized
ggcagcuagagaugcucaa

SEQ ID NO: 68681 - RNA, 19 nt, Artificial Sequence
  Chemically synthesized
guauauugucagugaagaa

SEQ ID NO: 68682 - RNA, 19 nt, Artificial Sequence
  Chemically synthesized
ccguguagcacucagauaa

SEQ ID NO: 68683 - RNA, 19 nt, Artificial Sequence
  Chemically synthesized
ccagaauaacccagaagaa

SEQ ID NO: 68684 - RNA, 19 nt, Artificial Sequence
  Chemically synthesized
ugcucagguugcaaauaaa

SEQ ID NO: 68685 - RNA, 19 nt, Artificial Sequence
  Chemically synthesized
ccaagaucucaggauccaa

SEQ ID NO: 68686 - RNA, 19 nt, Artificial Sequence
  Chemically synthesized
cauugugcugccucaugua

SEQ ID NO: 68687 - RNA, 19 nt, Artificial Sequence
  Chemically synthesized
uacuuccacccuucagaaa

SEQ ID NO: 68688 - RNA, 19 nt, Artificial Sequence
  Chemically synthesized
guuccuggugaauaucgaa

SEQ ID NO: 68689 - RNA, 19 nt, Artificial Sequence
  Chemically synthesized
caauguagcuugaaagcga

SEQ ID NO: 68690 - RNA, 19 nt, Artificial Sequence
  Chemically synthesized
ucauacccauccaagucag

SEQ ID NO: 68691 - RNA, 19 nt, Artificial Sequence
  Chemically synthesized
cuuccacccuucagaaaac

SEQ ID NO: 68692 - RNA, 19 nt, Artificial Sequence
  Chemically synthesized
gcugcuaucucccagcaua

SEQ ID NO: 68693 - RNA, 19 nt, Artificial Sequence
  Chemically synthesized
ggaugcucagguugcaaau

SEQ ID NO: 68694 - RNA, 19 nt, Artificial Sequence
  Chemically synthesized
aaaggagaacgguguuaau

SEQ ID NO: 68695 - RNA, 19 nt, Artificial Sequence
  Chemically synthesized
gaguuuuuguagcaucuua

SEQ ID NO: 68696 - RNA, 19 nt, Artificial Sequence
  Chemically synthesized
gaaugucucuagaagagaa

SEQ ID NO: 68697 - RNA, 19 nt, Artificial Sequence
  Chemically synthesized
gggacuguacccaagaauu

SEQ ID NO: 68698 - RNA, 19 nt, Artificial Sequence
  Chemically synthesized
gagacugcaugacaaucau

SEQ ID NO: 68699 - RNA, 19 nt, Artificial Sequence
  Chemically synthesized
ugcgcuuugggauuaugaa

SEQ ID NO: 68700 - RNA, 19 nt, Artificial Sequence
  Chemically synthesized
cuuacuuccacccuucaga

SEQ ID NO: 68701 - RNA, 19 nt, Artificial Sequence
  Chemically synthesized
cguccuggcugugucaaaa

SEQ ID NO: 68702 - RNA, 19 nt, Artificial Sequence
  Chemically synthesized
guuuguaggcugaauuuua

SEQ ID NO: 68703 - RNA, 19 nt, Artificial Sequence
  Chemically synthesized
gggcgcgccuuaaugauaa

SEQ ID NO: 68704 - RNA, 19 nt, Artificial Sequence
  Chemically synthesized
ggucucucugguuccugaa

SEQ ID NO: 68705 - RNA, 19 nt, Artificial Sequence
  Chemically synthesized
gccacucagcccaacuaaa

SEQ ID NO: 68706 - RNA, 19 nt, Artificial Sequence
  Chemically synthesized
ccagguucuaagcaagaaa

SEQ ID NO: 68707 - RNA, 19 nt, Artificial Sequence
  Chemically synthesized
gcugcaguaggucccuaua

SEQ ID NO: 68708 - RNA, 19 nt, Artificial Sequence
  Chemically synthesized
agagcagaaugccaagcua

SEQ ID NO: 68709 - RNA, 19 nt, Artificial Sequence
  Chemically synthesized
aaggccacguggaacagaa

SEQ ID NO: 68710 - RNA, 19 nt, Artificial Sequence
  Chemically synthesized
agaucagcgacaacagcaa

SEQ ID NO: 68711 - RNA, 19 nt, Artificial Sequence
  Chemically synthesized
caugcagacugcugcagau

SEQ ID NO: 68712 - RNA, 19 nt, Artificial Sequence
  Chemically synthesized
acuuaaaggccacguggaa

SEQ ID NO: 68713 - RNA, 19 nt, Artificial Sequence
  Chemically synthesized
aaaagugagagcacuuaaa

SEQ ID NO: 68714 - RNA, 19 nt, Artificial Sequence
  Chemically synthesized
ggcaguccagaaccugaaa

SEQ ID NO: 68715 - RNA, 19 nt, Artificial Sequence
  Chemically synthesized
agaagaaggcagcucuaca

SEQ ID NO: 68716 - RNA, 19 nt, Artificial Sequence
  Chemically synthesized
aggagcugcagcuaagaaa

SEQ ID NO: 68717 - RNA, 19 nt, Artificial Sequence
  Chemically synthesized
gguucggguccaagaugau

SEQ ID NO: 68718 - RNA, 19 nt, Artificial Sequence
  Chemically synthesized
cgauguuucuuaccgugua

SEQ ID NO: 68719 - RNA, 19 nt, Artificial Sequence
  Chemically synthesized
cauccacagggaagacgaa

SEQ ID NO: 68720 - RNA, 19 nt, Artificial Sequence
  Chemically synthesized
ggacauugugaguggacca

SEQ ID NO: 68721 - RNA, 19 nt, Artificial Sequence
  Chemically synthesized
gcaucacggcucuucacaa

SEQ ID NO: 68722 - RNA, 19 nt, Artificial Sequence
  Chemically synthesized
cucucugccuccugguaaa

SEQ ID NO: 68723 - RNA, 19 nt, Artificial Sequence
  Chemically synthesized
gugacugccagcucagaaa

SEQ ID NO: 68724 - RNA, 19 nt, Artificial Sequence
  Chemically synthesized
gggaugcucagguugcaaa

SEQ ID NO: 68725 - RNA, 19 nt, Artificial Sequence
  Chemically synthesized
gcucuacagcaaaaagaaa

SEQ ID NO: 68726 - RNA, 19 nt, Artificial Sequence
  Chemically synthesized
aggcagcucuacagcaaaa

SEQ ID NO: 68727 - RNA, 19 nt, Artificial Sequence
  Chemically synthesized
aacagaagagacuaagcaa

SEQ ID NO: 68728 - RNA, 19 nt, Artificial Sequence
  Chemically synthesized
gcuacagacuuacccguaa

SEQ ID NO: 68729 - RNA, 19 nt, Artificial Sequence
  Chemically synthesized
gaaggauugaagaauucac

SEQ ID NO: 68730 - RNA, 19 nt, Artificial Sequence
  Chemically synthesized
cuguguuugccaugaccua

SEQ ID NO: 68731 - RNA, 19 nt, Artificial Sequence
  Chemically synthesized
cuucuuccuucgucaugaa

SEQ ID NO: 68732 - RNA, 19 nt, Artificial Sequence
  Chemically synthesized
ccuccugguaaaaggacaa

SEQ ID NO: 68733 - RNA, 19 nt, Artificial Sequence
  Chemically synthesized
aguucucagcaguugucaa

SEQ ID NO: 68734 - RNA, 19 nt, Artificial Sequence
  Chemically synthesized
aaaaguuccuggugaauau

SEQ ID NO: 68735 - RNA, 19 nt, Artificial Sequence
  Chemically synthesized
cagaagaaccaaauccaga

SEQ ID NO: 68736 - RNA, 19 nt, Artificial Sequence
  Chemically synthesized
gauuuggaagucagaggaa

SEQ ID NO: 68737 - RNA, 19 nt, Artificial Sequence
  Chemically synthesized
aaggcagcucuacagcaaa

SEQ ID NO: 68738 - RNA, 19 nt, Artificial Sequence
  Chemically synthesized
caacagagggaguguuuga

SEQ ID NO: 68739 - RNA, 19 nt, Artificial Sequence
  Chemically synthesized
caggauccaaguuuaaaaa

SEQ ID NO: 68740 - RNA, 19 nt, Artificial Sequence
  Chemically synthesized
cuuuggagggagaauuuga

SEQ ID NO: 68741 - RNA, 19 nt, Artificial Sequence
  Chemically synthesized
guucuucaacgauuuggaa

SEQ ID NO: 68742 - RNA, 19 nt, Artificial Sequence
  Chemically synthesized
gguccuaaugggccaaaua

SEQ ID NO: 68743 - RNA, 19 nt, Artificial Sequence
  Chemically synthesized
aauccuuaccgaaaccaga

SEQ ID NO: 68744 - RNA, 19 nt, Artificial Sequence
  Chemically synthesized
ccuguuccuacaaaaccaa

SEQ ID NO: 68745 - RNA, 19 nt, Artificial Sequence
  Chemically synthesized
caaugagcagcacuucaca

SEQ ID NO: 68746 - RNA, 19 nt, Artificial Sequence
  Chemically synthesized
aguuccuggugaauaucga

SEQ ID NO: 68747 - RNA, 19 nt, Artificial Sequence
  Chemically synthesized
guagcuugaaagcgaugaa

SEQ ID NO: 68748 - RNA, 19 nt, Artificial Sequence
  Chemically synthesized
aauugaaucaagagcagaa

SEQ ID NO: 68749 - RNA, 19 nt, Artificial Sequence
  Chemically synthesized
ccaugacaaucagucugca

SEQ ID NO: 68750 - RNA, 19 nt, Artificial Sequence
  Chemically synthesized
gaggaaauugaacagauga

SEQ ID NO: 68751 - RNA, 19 nt, Artificial Sequence
  Chemically synthesized
caaguugcugagcaggaga

SEQ ID NO: 68752 - RNA, 19 nt, Artificial Sequence
  Chemically synthesized
gauugaagcccagcaacaa

SEQ ID NO: 68753 - RNA, 19 nt, Artificial Sequence
  Chemically synthesized
ccugaaacuuccacacaga

SEQ ID NO: 68754 - RNA, 19 nt, Artificial Sequence
  Chemically synthesized
agagaacagugacaugcca

SEQ ID NO: 68755 - RNA, 19 nt, Artificial Sequence
  Chemically synthesized
cauacccauccaagucagc

SEQ ID NO: 68756 - RNA, 19 nt, Artificial Sequence
  Chemically synthesized
ccauguauacgcaacagca

SEQ ID NO: 68757 - RNA, 19 nt, Artificial Sequence
  Chemically synthesized
ucugcuucuguaccucaaa

SEQ ID NO: 68758 - RNA, 19 nt, Artificial Sequence
  Chemically synthesized
agaucuuuucccaagccaa

SEQ ID NO: 68759 - RNA, 19 nt, Artificial Sequence
  Chemically synthesized
agcucuacagcaaaaagaa

SEQ ID NO: 68760 - RNA, 19 nt, Artificial Sequence
  Chemically synthesized
cugagaaucaggaagcuaa

SEQ ID NO: 68761 - RNA, 19 nt, Artificial Sequence
  Chemically synthesized
cagggacauugugagugga

SEQ ID NO: 68762 - RNA, 19 nt, Artificial Sequence
  Chemically synthesized
gagcguaucgcucauggaa

SEQ ID NO: 68763 - RNA, 19 nt, Artificial Sequence
  Chemically synthesized
gacaaacuugcguaaaacu

SEQ ID NO: 68764 - RNA, 19 nt, Artificial Sequence
  Chemically synthesized
ggaagucagaggaacgaag

SEQ ID NO: 68765 - RNA, 19 nt, Artificial Sequence
  Chemically synthesized
guuugauguucuucaacga

SEQ ID NO: 68766 - RNA, 19 nt, Artificial Sequence
  Chemically synthesized
cagaagcuuuuauaucaga

SEQ ID NO: 68767 - RNA, 19 nt, Artificial Sequence
  Chemically synthesized
ggaaguucucagcaguugu

SEQ ID NO: 68768 - RNA, 19 nt, Artificial Sequence
  Chemically synthesized
guccguucucaauguuuga

SEQ ID NO: 68769 - RNA, 19 nt, Artificial Sequence
  Chemically synthesized
cagaaguggcagucaugga

SEQ ID NO: 68770 - RNA, 19 nt, Artificial Sequence
  Chemically synthesized
ugaacuucaggaaauggca

SEQ ID NO: 68771 - RNA, 19 nt, Artificial Sequence
  Chemically synthesized
guugguugucagugaacaa

SEQ ID NO: 68772 - RNA, 19 nt, Artificial Sequence
  Chemically synthesized
aagaauccugucuaguaaa

SEQ ID NO: 68773 - RNA, 19 nt, Artificial Sequence
  Chemically synthesized
agaugaugccgauguuucu

SEQ ID NO: 68774 - RNA, 19 nt, Artificial Sequence
  Chemically synthesized
accguggcagcaaguucaa

SEQ ID NO: 68775 - RNA, 19 nt, Artificial Sequence
  Chemically synthesized
gcagaaugccaagcuacaa

SEQ ID NO: 68776 - RNA, 19 nt, Artificial Sequence
  Chemically synthesized
aguugcugagcaggagaaa

SEQ ID NO: 68777 - RNA, 19 nt, Artificial Sequence
  Chemically synthesized
caccauuagaggacauuua

SEQ ID NO: 68778 - RNA, 19 nt, Artificial Sequence
  Chemically synthesized
ugaaggauugaagaauuca

SEQ ID NO: 68779 - RNA, 19 nt, Artificial Sequence
  Chemically synthesized
uggcaaaaauuucacaaga

SEQ ID NO: 68780 - RNA, 19 nt, Artificial Sequence
  Chemically synthesized
gacgaagaugaaaucgaau

SEQ ID NO: 68781 - RNA, 19 nt, Artificial Sequence
  Chemically synthesized
agggaagacgaagaugaaa

SEQ ID NO: 68782 - RNA, 19 nt, Artificial Sequence
  Chemically synthesized
gccuccugguaaaaggaca

SEQ ID NO: 68783 - RNA, 19 nt, Artificial Sequence
  Chemically synthesized
aucauacccauccaaguca

SEQ ID NO: 68784 - RNA, 19 nt, Artificial Sequence
  Chemically synthesized
aguucaggagaaccaugaa

SEQ ID NO: 68785 - RNA, 19 nt, Artificial Sequence
  Chemically synthesized
cgacagccaccaugacaau

SEQ ID NO: 68786 - RNA, 19 nt, Artificial Sequence
  Chemically synthesized
agcuagagaugcucaagaa

SEQ ID NO: 68787 - RNA, 19 nt, Artificial Sequence
  Chemically synthesized
gggaaacuuguggaggaaa

SEQ ID NO: 68788 - RNA, 19 nt, Artificial Sequence
  Chemically synthesized
aaaaagugagagcacuuaa

SEQ ID NO: 68789 - RNA, 19 nt, Artificial Sequence
  Chemically synthesized
aucaggaagcuaagcuaaa

SEQ ID NO: 68790 - RNA, 19 nt, Artificial Sequence
  Chemically synthesized
cugggacuguacccaagaa

SEQ ID NO: 68791 - RNA, 19 nt, Artificial Sequence
  Chemically synthesized
gagggauauguuccacgua

SEQ ID NO: 68792 - RNA, 19 nt, Artificial Sequence
  Chemically synthesized
gcuucuuccuucgucauga

SEQ ID NO: 68793 - RNA, 19 nt, Artificial Sequence
  Chemically synthesized
ugauuaugagccugaggga

SEQ ID NO: 68794 - RNA, 19 nt, Artificial Sequence
  Chemically synthesized
uagaaauccagaauccaua

SEQ ID NO: 68795 - RNA, 19 nt, Artificial Sequence
  Chemically synthesized
accuagaagccuuacgaaa

SEQ ID NO: 68796 - RNA, 19 nt, Artificial Sequence
  Chemically synthesized
gaccuagaagccuuacgaa

SEQ ID NO: 68797 - RNA, 19 nt, Artificial Sequence
  Chemically synthesized
accuuacuuccacccuuca

SEQ ID NO: 68798 - RNA, 19 nt, Artificial Sequence
  Chemically synthesized
cuguuccuacaaaaccaaa

SEQ ID NO: 68799 - RNA, 19 nt, Artificial Sequence
  Chemically synthesized
ccugauuggaguccuucaa

SEQ ID NO: 68800 - RNA, 19 nt, Artificial Sequence
  Chemically synthesized
cccuauauccagucgucua

SEQ ID NO: 68801 - RNA, 19 nt, Artificial Sequence
  Chemically synthesized
gagcuugaucgccucuaua

SEQ ID NO: 68802 - RNA, 19 nt, Artificial Sequence
  Chemically synthesized
ugagaaucaggaagcuaag

SEQ ID NO: 68803 - RNA, 19 nt, Artificial Sequence
  Chemically synthesized
cagcaacaauugcuggcaa

SEQ ID NO: 68804 - RNA, 19 nt, Artificial Sequence
  Chemically synthesized
agauugaagcccagcaaca

SEQ ID NO: 68805 - RNA, 19 nt, Artificial Sequence
  Chemically synthesized
uaagcuacgguaccaguaa

SEQ ID NO: 68806 - RNA, 19 nt, Artificial Sequence
  Chemically synthesized
gcgccuuaaugauaaggag

SEQ ID NO: 68807 - RNA, 19 nt, Artificial Sequence
  Chemically synthesized
uacccauccaagucagcuu

SEQ ID NO: 68808 - RNA, 19 nt, Artificial Sequence
  Chemically synthesized
gaaucaacagcagcaccca

SEQ ID NO: 68809 - RNA, 19 nt, Artificial Sequence
  Chemically synthesized
ugaccaagacucauaccag

SEQ ID NO: 68810 - RNA, 19 nt, Artificial Sequence
  Chemically synthesized
aaagugcguccguucucaa

SEQ ID NO: 68811 - RNA, 19 nt, Artificial Sequence
  Chemically synthesized
ggucauucaggcuucagag

SEQ ID NO: 68812 - RNA, 19 nt, Artificial Sequence
  Chemically synthesized
ccaguuucaucugauggaa

SEQ ID NO: 68813 - RNA, 19 nt, Artificial Sequence
  Chemically synthesized
uggcugugucaaaaguaga

SEQ ID NO: 68814 - RNA, 19 nt, Artificial Sequence
  Chemically synthesized
cgaugaagaaugucucuag

SEQ ID NO: 68815 - RNA, 19 nt, Artificial Sequence
  Chemically synthesized
gcaaaaauuucacaagacu

SEQ ID NO: 68816 - RNA, 19 nt, Artificial Sequence
  Chemically synthesized
agggauauguuccacguaa

SEQ ID NO: 68817 - RNA, 19 nt, Artificial Sequence
  Chemically synthesized
ggagggauauguuccacgu

SEQ ID NO: 68818 - RNA, 19 nt, Artificial Sequence
  Chemically synthesized
agaaggagacugcaugaca

SEQ ID NO: 68819 - RNA, 19 nt, Artificial Sequence
  Chemically synthesized
ggauggacuccauuacauu

SEQ ID NO: 68820 - RNA, 19 nt, Artificial Sequence
  Chemically synthesized
cagagggccacacuuuuca

SEQ ID NO: 68821 - RNA, 19 nt, Artificial Sequence
  Chemically synthesized
agaccagacccuuucucca

SEQ ID NO: 68822 - RNA, 19 nt, Artificial Sequence
  Chemically synthesized
cauaccuucgguuggccaa

SEQ ID NO: 68823 - RNA, 19 nt, Artificial Sequence
  Chemically synthesized
cugggaaugcucuggauca

SEQ ID NO: 68824 - RNA, 19 nt, Artificial Sequence
  Chemically synthesized
aaugcagaucuuuucccaa

SEQ ID NO: 68825 - RNA, 19 nt, Artificial Sequence
  Chemically synthesized
ggcagucauggauaagcgu

SEQ ID NO: 68826 - RNA, 19 nt, Artificial Sequence
  Chemically synthesized
gccucuauaaggagcugca

SEQ ID NO: 68827 - RNA, 19 nt, Artificial Sequence
  Chemically synthesized
aaucaggaagcuaagcuaa

SEQ ID NO: 68828 - RNA, 19 nt, Artificial Sequence
  Chemically synthesized
aacaauugcuggcaacuaa

SEQ ID NO: 68829 - RNA, 19 nt, Artificial Sequence
  Chemically synthesized
ugguugucagugaacaaua

SEQ ID NO: 68830 - RNA, 19 nt, Artificial Sequence
  Chemically synthesized
ggcaguugggaaaucagcu

SEQ ID NO: 68831 - RNA, 19 nt, Artificial Sequence
  Chemically synthesized
aaagaaggagacugcauga

SEQ ID NO: 68832 - RNA, 19 nt, Artificial Sequence
  Chemically synthesized
ugagcugcccaugaaagaa

SEQ ID NO: 68833 - RNA, 19 nt, Artificial Sequence
  Chemically synthesized
cauuuaugcgcuuugggau

SEQ ID NO: 68834 - RNA, 19 nt, Artificial Sequence
  Chemically synthesized
ccauggagaccaucucugu

SEQ ID NO: 68835 - RNA, 19 nt, Artificial Sequence
  Chemically synthesized
acgcaccaaggccucuaaa

SEQ ID NO: 68836 - RNA, 19 nt, Artificial Sequence
  Chemically synthesized
ugcugaccuagaagccuua

SEQ ID NO: 68837 - RNA, 19 nt, Artificial Sequence
  Chemically synthesized
uuaucuaauccuuaccgaa

SEQ ID NO: 68838 - RNA, 19 nt, Artificial Sequence
  Chemically synthesized
accuccuguuccuacaaaa

SEQ ID NO: 68839 - RNA, 19 nt, Artificial Sequence
  Chemically synthesized
cccugauuggaguccuuca

SEQ ID NO: 68840 - RNA, 19 nt, Artificial Sequence
  Chemically synthesized
acaaacuaaaggcucuaaa

SEQ ID NO: 68841 - RNA, 19 nt, Artificial Sequence
  Chemically synthesized
acuuguauauugucaguga

SEQ ID NO: 68842 - RNA, 19 nt, Artificial Sequence
  Chemically synthesized
ucuagaagagaaugaagga

SEQ ID NO: 68843 - RNA, 19 nt, Artificial Sequence
  Chemically synthesized
ugauggauggacuccauua

SEQ ID NO: 68844 - RNA, 19 nt, Artificial Sequence
  Chemically synthesized
gagaagacucggugagcau

SEQ ID NO: 68845 - RNA, 19 nt, Artificial Sequence
  Chemically synthesized
acaacagcccaaaucucca

SEQ ID NO: 68846 - RNA, 19 nt, Artificial Sequence
  Chemically synthesized
ccuuccuuugguacucuga

SEQ ID NO: 68847 - RNA, 19 nt, Artificial Sequence
  Chemically synthesized
gaaugccaagcuacaacaa

SEQ ID NO: 68848 - RNA, 19 nt, Artificial Sequence
  Chemically synthesized
ucgacagccaccaugacaa

SEQ ID NO: 68849 - RNA, 19 nt, Artificial Sequence
  Chemically synthesized
ugaagaauucaccauuaga

SEQ ID NO: 68850 - RNA, 19 nt, Artificial Sequence
  Chemically synthesized
aucucaggauccaaguuua

SEQ ID NO: 68851 - RNA, 19 nt, Artificial Sequence
  Chemically synthesized
gggauuaugaaccucagaa

SEQ ID NO: 68852 - RNA, 19 nt, Artificial Sequence
  Chemically synthesized
uggaagucagaggaacgaa

SEQ ID NO: 68853 - RNA, 19 nt, Artificial Sequence
  Chemically synthesized
uggucucucugguuccuga

SEQ ID NO: 68854 - RNA, 19 nt, Artificial Sequence
  Chemically synthesized
ggguccuaaugggccaaau

SEQ ID NO: 68855 - RNA, 19 nt, Artificial Sequence
  Chemically synthesized
agagugaugcugaccuaga

SEQ ID NO: 68856 - RNA, 19 nt, Artificial Sequence
  Chemically synthesized
cagacacugcccaacauga

SEQ ID NO: 68857 - RNA, 19 nt, Artificial Sequence
  Chemically synthesized
aaauacagacacugcccaa

SEQ ID NO: 68858 - RNA, 19 nt, Artificial Sequence
  Chemically synthesized
cagcucuacagcaaaaaga

SEQ ID NO: 68859 - RNA, 19 nt, Artificial Sequence
  Chemically synthesized
gcacuucacagaaguucca

SEQ ID NO: 68860 - RNA, 19 nt, Artificial Sequence
  Chemically synthesized
cagccaccaugacaaucag

SEQ ID NO: 68861 - RNA, 19 nt, Artificial Sequence
  Chemically synthesized
ggcuaaaagaaauagcuga

SEQ ID NO: 68862 - RNA, 19 nt, Artificial Sequence
  Chemically synthesized
ggugaauaucgaagaaagg

SEQ ID NO: 68863 - RNA, 19 nt, Artificial Sequence
  Chemically synthesized
cugaaacuuccacacagaa

SEQ ID NO: 68864 - RNA, 19 nt, Artificial Sequence
  Chemically synthesized
gaugaugagcugcccauga

SEQ ID NO: 68865 - RNA, 19 nt, Artificial Sequence
  Chemically synthesized
cuacacucagugcucccaa

SEQ ID NO: 68866 - RNA, 19 nt, Artificial Sequence
  Chemically synthesized
agaaauccagaauccauau

SEQ ID NO: 68867 - RNA, 19 nt, Artificial Sequence
  Chemically synthesized
ugauguucuucaacgauuu

SEQ ID NO: 68868 - RNA, 19 nt, Artificial Sequence
  Chemically synthesized
aguugcggauaaugagcga

SEQ ID NO: 68869 - RNA, 19 nt, Artificial Sequence
  Chemically synthesized
caggcgccaggaaaaaacu

SEQ ID NO: 68870 - RNA, 19 nt, Artificial Sequence
  Chemically synthesized
agcagaaugccaagcuaca

SEQ ID NO: 68871 - RNA, 19 nt, Artificial Sequence
  Chemically synthesized
ggagcugcagcuaagaaac

SEQ ID NO: 68872 - RNA, 19 nt, Artificial Sequence
  Chemically synthesized
cagugcucccaauuucuuu

SEQ ID NO: 68873 - RNA, 19 nt, Artificial Sequence
  Chemically synthesized
aaaugcugcugauagugau

SEQ ID NO: 68874 - RNA, 19 nt, Artificial Sequence
  Chemically synthesized
auuugaccuuguacagaga

SEQ ID NO: 68875 - RNA, 19 nt, Artificial Sequence
  Chemically synthesized
cucagagcguaucgcucau

SEQ ID NO: 68876 - RNA, 19 nt, Artificial Sequence
  Chemically synthesized
aaggacaaacuugcguaaa

SEQ ID NO: 68877 - RNA, 19 nt, Artificial Sequence
  Chemically synthesized
ucuccagaauaacccagaa

SEQ ID NO: 68878 - RNA, 19 nt, Artificial Sequence
  Chemically synthesized
uuacauguggagcccgaaa

SEQ ID NO: 68879 - RNA, 19 nt, Artificial Sequence
  Chemically synthesized
auaucagaggaccaccaua

SEQ ID NO: 68880 - RNA, 19 nt, Artificial Sequence
  Chemically synthesized
uggcaguccagaaccugaa

SEQ ID NO: 68881 - RNA, 19 nt, Artificial Sequence
  Chemically synthesized
cagccaccuucagacauua

SEQ ID NO: 68882 - RNA, 19 nt, Artificial Sequence
  Chemically synthesized
cuuggucauucaggcuuca

SEQ ID NO: 68883 - RNA, 19 nt, Artificial Sequence
  Chemically synthesized
ugaccaggcagcuagagau

SEQ ID NO: 68884 - RNA, 19 nt, Artificial Sequence
  Chemically synthesized
gcaaugggaaacuugugga

SEQ ID NO: 68885 - RNA, 19 nt, Artificial Sequence
  Chemically synthesized
uacgguaccaguaauuaga

SEQ ID NO: 68886 - RNA, 19 nt, Artificial Sequence
  Chemically synthesized
aauguagcuugaaagcgau

SEQ ID NO: 68887 - RNA, 19 nt, Artificial Sequence
  Chemically synthesized
gacaaucauccacagggaa

SEQ ID NO: 68888 - RNA, 19 nt, Artificial Sequence
  Chemically synthesized
cuuuauggaguucaggaga

SEQ ID NO: 68889 - RNA, 19 nt, Artificial Sequence
  Chemically synthesized
ccugguacaguuuggugua

SEQ ID NO: 68890 - RNA, 19 nt, Artificial Sequence
  Chemically synthesized
caaacuugcguaaaacugg

SEQ ID NO: 68891 - RNA, 19 nt, Artificial Sequence
  Chemically synthesized
aguacagagaacagugaca

SEQ ID NO: 68892 - RNA, 19 nt, Artificial Sequence
  Chemically synthesized
gcccaguagaaauccagaa

SEQ ID NO: 68893 - RNA, 19 nt, Artificial Sequence
  Chemically synthesized
gcucagaaagcccaguaga

SEQ ID NO: 68894 - RNA, 19 nt, Artificial Sequence
  Chemically synthesized
cauccaagucagcuucugu

SEQ ID NO: 68895 - RNA, 19 nt, Artificial Sequence
  Chemically synthesized
caucauacccauccaaguc

SEQ ID NO: 68896 - RNA, 19 nt, Artificial Sequence
  Chemically synthesized
caguccagaaccugaaaca

SEQ ID NO: 68897 - RNA, 19 nt, Artificial Sequence
  Chemically synthesized
ccuuacuuccacccuucag

SEQ ID NO: 68898 - RNA, 19 nt, Artificial Sequence
  Chemically synthesized
cauuaagccagacggaagu

SEQ ID NO: 68899 - RNA, 19 nt, Artificial Sequence
  Chemically synthesized
aacuaaucagccaccuuca

SEQ ID NO: 68900 - RNA, 19 nt, Artificial Sequence
  Chemically synthesized
caauaugcagagacguggu

SEQ ID NO: 68901 - RNA, 19 nt, Artificial Sequence
  Chemically synthesized
cuaaaggcucuaaaaucca

SEQ ID NO: 68902 - RNA, 19 nt, Artificial Sequence
  Chemically synthesized
guuacuccagaaacaauau

SEQ ID NO: 68903 - RNA, 19 nt, Artificial Sequence
  Chemically synthesized
caguaggucccuauaucca

SEQ ID NO: 68904 - RNA, 19 nt, Artificial Sequence
  Chemically synthesized
accggcuguggaagaagaa

SEQ ID NO: 68905 - RNA, 19 nt, Artificial Sequence
  Chemically synthesized
aguuccaguuacuccagaa

SEQ ID NO: 68906 - RNA, 19 nt, Artificial Sequence
  Chemically synthesized
cagucauggauaagcgugu

SEQ ID NO: 68907 - RNA, 19 nt, Artificial Sequence
  Chemically synthesized
aacugaccaggcagcuaga

SEQ ID NO: 68908 - RNA, 19 nt, Artificial Sequence
  Chemically synthesized
augggaaacuuguggagga

SEQ ID NO: 68909 - RNA, 19 nt, Artificial Sequence
  Chemically synthesized
aauagcugagaaucaggaa

SEQ ID NO: 68910 - RNA, 19 nt, Artificial Sequence
  Chemically synthesized
cagcgacaacagcaacaag

SEQ ID NO: 68911 - RNA, 19 nt, Artificial Sequence
  Chemically synthesized
cuugcugaacuucaggaaa

SEQ ID NO: 68912 - RNA, 19 nt, Artificial Sequence
  Chemically synthesized
cagacuuacccguaauauu

SEQ ID NO: 68913 - RNA, 19 nt, Artificial Sequence
  Chemically synthesized
auuagaaacuugcuacaga

SEQ ID NO: 68914 - RNA, 19 nt, Artificial Sequence
  Chemically synthesized
aaggcacugcacacuugua

SEQ ID NO: 68915 - RNA, 19 nt, Artificial Sequence
  Chemically synthesized
gaaggcacugcacacuugu

SEQ ID NO: 68916 - RNA, 19 nt, Artificial Sequence
  Chemically synthesized
gaagagaaugaaggauuga

SEQ ID NO: 68917 - RNA, 19 nt, Artificial Sequence
  Chemically synthesized
uaaugauaaggagggauau

SEQ ID NO: 68918 - RNA, 19 nt, Artificial Sequence
  Chemically synthesized
augaugagcugcccaugaa

SEQ ID NO: 68919 - RNA, 19 nt, Artificial Sequence
  Chemically synthesized
auaagugcgaggaaaugga

SEQ ID NO: 68920 - RNA, 19 nt, Artificial Sequence
  Chemically synthesized
ugugcugccucauguaaca

SEQ ID NO: 68921 - RNA, 19 nt, Artificial Sequence
  Chemically synthesized
agugauggauggacuccau

SEQ ID NO: 68922 - RNA, 19 nt, Artificial Sequence
  Chemically synthesized
ugguacaguuugguguaaa

SEQ ID NO: 68923 - RNA, 19 nt, Artificial Sequence
  Chemically synthesized
ugugcaggccacacagaaa

SEQ ID NO: 68924 - RNA, 19 nt, Artificial Sequence
  Chemically synthesized
auucgucuuuggagggaga

SEQ ID NO: 68925 - RNA, 19 nt, Artificial Sequence
  Chemically synthesized
cccagacaacagcccaaau

SEQ ID NO: 68926 - RNA, 19 nt, Artificial Sequence
  Chemically synthesized
ugugacugccagcucagaa

SEQ ID NO: 68927 - RNA, 19 nt, Artificial Sequence
  Chemically synthesized
cuaaugggccaaauauuca

SEQ ID NO: 68928 - RNA, 19 nt, Artificial Sequence
  Chemically synthesized
uacugccuuucuuaucuaa

SEQ ID NO: 68929 - RNA, 19 nt, Artificial Sequence
  Chemically synthesized
uccguccaugggaacuaaa

SEQ ID NO: 68930 - RNA, 19 nt, Artificial Sequence
  Chemically synthesized
guuguuccguccaugggaa

SEQ ID NO: 68931 - RNA, 19 nt, Artificial Sequence
  Chemically synthesized
ccaccuccuguuccuacaa

SEQ ID NO: 68932 - RNA, 19 nt, Artificial Sequence
  Chemically synthesized
gcugagggagaaagagaag

SEQ ID NO: 68933 - RNA, 19 nt, Artificial Sequence
  Chemically synthesized
gacacugcccaacaugaga

SEQ ID NO: 68934 - RNA, 19 nt, Artificial Sequence
  Chemically synthesized
ucaagaacggcaggaucga

SEQ ID NO: 68935 - RNA, 19 nt, Artificial Sequence
  Chemically synthesized
gauggaucugacucuugcu

SEQ ID NO: 68936 - RNA, 19 nt, Artificial Sequence
  Chemically synthesized
gucacaucgcugucucuga

SEQ ID NO: 68937 - RNA, 19 nt, Artificial Sequence
  Chemically synthesized
ugacaaucauccacaggga

SEQ ID NO: 68938 - RNA, 19 nt, Artificial Sequence
  Chemically synthesized
gcaugacaaucauccacag

SEQ ID NO: 68939 - RNA, 19 nt, Artificial Sequence
  Chemically synthesized
ugcccaugaaagaaggaga

SEQ ID NO: 68940 - RNA, 19 nt, Artificial Sequence
  Chemically synthesized
gaaauggaggaaggcuaca

SEQ ID NO: 68941 - RNA, 19 nt, Artificial Sequence
  Chemically synthesized
ugcagauaagugcgaggaa

SEQ ID NO: 68942 - RNA, 19 nt, Artificial Sequence
  Chemically synthesized
gcuugauguguaccuggag

SEQ ID NO: 68943 - RNA, 19 nt, Artificial Sequence
  Chemically synthesized
aaaucuccagaauaaccca

SEQ ID NO: 68944 - RNA, 19 nt, Artificial Sequence
  Chemically synthesized
cuuuuauaucagaggacca

SEQ ID NO: 68945 - RNA, 19 nt, Artificial Sequence
  Chemically synthesized
cgaaagaauuccucggcca

SEQ ID NO: 68946 - RNA, 19 nt, Artificial Sequence
  Chemically synthesized
auuccaauagccagggcaa

SEQ ID NO: 68947 - RNA, 19 nt, Artificial Sequence
  Chemically synthesized
aauugcugcugcccagaau

SEQ ID NO: 68948 - RNA, 19 nt, Artificial Sequence
  Chemically synthesized
caggaaaaaacuuccagca

SEQ ID NO: 68949 - RNA, 19 nt, Artificial Sequence
  Chemically synthesized
cuccagguucuaagcaaga

SEQ ID NO: 68950 - RNA, 19 nt, Artificial Sequence
  Chemically synthesized
aacagagggaguguuugaa

SEQ ID NO: 68951 - RNA, 19 nt, Artificial Sequence
  Chemically synthesized
ugagcuugaucgccucuau

SEQ ID NO: 68952 - RNA, 19 nt, Artificial Sequence
  Chemically synthesized
aagagacuaagcaauggga

SEQ ID NO: 68953 - RNA, 19 nt, Artificial Sequence
  Chemically synthesized
ugcuggcaacuaaggaaca

SEQ ID NO: 68954 - RNA, 19 nt, Artificial Sequence
  Chemically synthesized
uguauauugucagugaaga

SEQ ID NO: 68955 - RNA, 19 nt, Artificial Sequence
  Chemically synthesized
aaaggugucccguguagca

SEQ ID NO: 68956 - RNA, 19 nt, Artificial Sequence
  Chemically synthesized
ccuuaaugauaaggaggga

SEQ ID NO: 68957 - RNA, 19 nt, Artificial Sequence
  Chemically synthesized
ucauuuaugcgcuuuggga

SEQ ID NO: 68958 - RNA, 19 nt, Artificial Sequence
  Chemically synthesized
gaauuugaccuuguacaga

SEQ ID NO: 68959 - RNA, 19 nt, Artificial Sequence
  Chemically synthesized
aaaaggacaaacuugcgua

SEQ ID NO: 68960 - RNA, 19 nt, Artificial Sequence
  Chemically synthesized
acauguggagcccgaaaag

SEQ ID NO: 68961 - RNA, 19 nt, Artificial Sequence
  Chemically synthesized
gccuguuucuucaguucag

SEQ ID NO: 68962 - RNA, 19 nt, Artificial Sequence
  Chemically synthesized
gccacacuuuucaagugua

SEQ ID NO: 68963 - RNA, 19 nt, Artificial Sequence
  Chemically synthesized
gcaagaaaguccaccugcu

SEQ ID NO: 68964 - RNA, 19 nt, Artificial Sequence
  Chemically synthesized
aagugcguccguucucaau

SEQ ID NO: 68965 - RNA, 19 nt, Artificial Sequence
  Chemically synthesized
aaaugcagaucuuuuccca

SEQ ID NO: 68966 - RNA, 19 nt, Artificial Sequence
  Chemically synthesized
acuccagaaacaauaugca

SEQ ID NO: 68967 - RNA, 19 nt, Artificial Sequence
  Chemically synthesized
aagaaauagcugagaauca

SEQ ID NO: 68968 - RNA, 19 nt, Artificial Sequence
  Chemically synthesized
ugucagugaagaacuguua

SEQ ID NO: 68969 - RNA, 19 nt, Artificial Sequence
  Chemically synthesized
gacaauccuguuuucuaca

SEQ ID NO: 68970 - RNA, 19 nt, Artificial Sequence
  Chemically synthesized
cccguguagcacucagaua

SEQ ID NO: 68971 - RNA, 19 nt, Artificial Sequence
  Chemically synthesized
gucucuagaagagaaugaa

SEQ ID NO: 68972 - RNA, 19 nt, Artificial Sequence
  Chemically synthesized
ucucaggauccaaguuuaa

SEQ ID NO: 68973 - RNA, 19 nt, Artificial Sequence
  Chemically synthesized
ugggacuguacccaagaau

SEQ ID NO: 68974 - RNA, 19 nt, Artificial Sequence
  Chemically synthesized
ugggcgcgccuuaaugaua

SEQ ID NO: 68975 - RNA, 19 nt, Artificial Sequence
  Chemically synthesized
cauguaacaacguccaagu

SEQ ID NO: 68976 - RNA, 19 nt, Artificial Sequence
  Chemically synthesized
gaagucagaggaacgaagu

SEQ ID NO: 68977 - RNA, 19 nt, Artificial Sequence
  Chemically synthesized
auguguaccuggaggagua

SEQ ID NO: 68978 - RNA, 19 nt, Artificial Sequence
  Chemically synthesized
gaauaacccagaagaacca

SEQ ID NO: 68979 - RNA, 19 nt, Artificial Sequence
  Chemically synthesized
cucugguuccugaaucauu

SEQ ID NO: 68980 - RNA, 19 nt, Artificial Sequence
  Chemically synthesized
uuuacauguggagcccgaa

SEQ ID NO: 68981 - RNA, 19 nt, Artificial Sequence
  Chemically synthesized
agcccaguagaaauccaga

SEQ ID NO: 68982 - RNA, 19 nt, Artificial Sequence
  Chemically synthesized
agagccagaggguccuaau

SEQ ID NO: 68983 - RNA, 19 nt, Artificial Sequence
  Chemically synthesized
ccacacuuuucaaguguau

SEQ ID NO: 68984 - RNA, 19 nt, Artificial Sequence
  Chemically synthesized
ccauuuggcugaagugugg

SEQ ID NO: 68985 - RNA, 19 nt, Artificial Sequence
  Chemically synthesized
gacauuaagccagacggaa

SEQ ID NO: 68986 - RNA, 19 nt, Artificial Sequence
  Chemically synthesized
aaauguggcuaaaguacca

SEQ ID NO: 68987 - RNA, 19 nt, Artificial Sequence
  Chemically synthesized
gaaagagaagaaagugcgu

SEQ ID NO: 68988 - RNA, 19 nt, Artificial Sequence
  Chemically synthesized
gcucugcuucuguaccuca

SEQ ID NO: 68989 - RNA, 19 nt, Artificial Sequence
  Chemically synthesized
aguuggcccugauuggagu

SEQ ID NO: 68990 - RNA, 19 nt, Artificial Sequence
  Chemically synthesized
gcucuaaaauccauccagu

SEQ ID NO: 68991 - RNA, 19 nt, Artificial Sequence
  Chemically synthesized
cacuuaaaggccacgugga

SEQ ID NO: 68992 - RNA, 19 nt, Artificial Sequence
  Chemically synthesized
cagaaauuagaaacuugcu

SEQ ID NO: 68993 - RNA, 19 nt, Artificial Sequence
  Chemically synthesized
cuacgguaccaguaauuag

SEQ ID NO: 68994 - RNA, 19 nt, Artificial Sequence
  Chemically synthesized
ugggcaguugggaaaucag

SEQ ID NO: 68995 - RNA, 19 nt, Artificial Sequence
  Chemically synthesized
gaugaaaucgaaugguggu

SEQ ID NO: 68996 - RNA, 19 nt, Artificial Sequence
  Chemically synthesized
caaucauccacagggaaga

SEQ ID NO: 68997 - RNA, 19 nt, Artificial Sequence
  Chemically synthesized
cagacugcugcagauaagu

SEQ ID NO: 68998 - RNA, 19 nt, Artificial Sequence
  Chemically synthesized
ugcugcugauagugaugga

SEQ ID NO: 68999 - RNA, 19 nt, Artificial Sequence
  Chemically synthesized
auggaaugagggugaaauu

SEQ ID NO: 69000 - RNA, 19 nt, Artificial Sequence
  Chemically synthesized
aaaacuggcucagagcgua

SEQ ID NO: 69001 - RNA, 19 nt, Artificial Sequence
  Chemically synthesized
aaauccagaggcuccacau

SEQ ID NO: 69002 - RNA, 19 nt, Artificial Sequence
  Chemically synthesized
uccagaauccauauuuaca

SEQ ID NO: 69003 - RNA, 19 nt, Artificial Sequence
  Chemically synthesized
guccuaaugggccaaauau

SEQ ID NO: 69004 - RNA, 19 nt, Artificial Sequence
  Chemically synthesized
aggccucuaaagaaacgua

SEQ ID NO: 69005 - RNA, 19 nt, Artificial Sequence
  Chemically synthesized
aaagaaacugucuaacgca

SEQ ID NO: 69006 - RNA, 19 nt, Artificial Sequence
  Chemically synthesized
cuuaucuaauccuuaccga

SEQ ID NO: 69007 - RNA, 19 nt, Artificial Sequence
  Chemically synthesized
gaacguccaguugcggaua

SEQ ID NO: 69008 - RNA, 19 nt, Artificial Sequence
  Chemically synthesized
uuccguccaugggaacuaa

SEQ ID NO: 69009 - RNA, 19 nt, Artificial Sequence
  Chemically synthesized
agacauuaagccagacgga

SEQ ID NO: 69010 - RNA, 19 nt, Artificial Sequence
  Chemically synthesized
cuucagacauuaagccaga

SEQ ID NO: 69011 - RNA, 19 nt, Artificial Sequence
  Chemically synthesized
caaacuaaucagccaccuu

SEQ ID NO: 69012 - RNA, 19 nt, Artificial Sequence
  Chemically synthesized
gagagugauugccauuugg

SEQ ID NO: 69013 - RNA, 19 nt, Artificial Sequence
  Chemically synthesized
accaccuccuguuccuaca

SEQ ID NO: 69014 - RNA, 19 nt, Artificial Sequence
  Chemically synthesized
ugcaguagaccaguccaau

SEQ ID NO: 69015 - RNA, 19 nt, Artificial Sequence
  Chemically synthesized
cuucaaaugcagaucuuuu

SEQ ID NO: 69016 - RNA, 19 nt, Artificial Sequence
  Chemically synthesized
agcugcagcuaagaaacaa

SEQ ID NO: 69017 - RNA, 19 nt, Artificial Sequence
  Chemically synthesized
uaaggagcugcagcuaaga

SEQ ID NO: 69018 - RNA, 19 nt, Artificial Sequence
  Chemically synthesized
agcuugaucgccucuauaa

SEQ ID NO: 69019 - RNA, 19 nt, Artificial Sequence
  Chemically synthesized
aacuuguggaggaaauuga

SEQ ID NO: 69020 - RNA, 19 nt, Artificial Sequence
  Chemically synthesized
caacaagaucagcgacaac

SEQ ID NO: 69021 - RNA, 19 nt, Artificial Sequence
  Chemically synthesized
aauaucgaagaaaggagaa

SEQ ID NO: 69022 - RNA, 19 nt, Artificial Sequence
  Chemically synthesized
uucagcagcugcuccuaaa

SEQ ID NO: 69023 - RNA, 19 nt, Artificial Sequence
  Chemically synthesized
uuauugggcaguugggaaa

SEQ ID NO: 69024 - RNA, 19 nt, Artificial Sequence
  Chemically synthesized
auaaguauacagcgacaau

SEQ ID NO: 69025 - RNA, 19 nt, Artificial Sequence
  Chemically synthesized
uagaggacauuuagcguga

SEQ ID NO: 69026 - RNA, 19 nt, Artificial Sequence
  Chemically synthesized
gcuuggccugaaacuucca

SEQ ID NO: 69027 - RNA, 19 nt, Artificial Sequence
  Chemically synthesized
gggauauguuccacguaac

SEQ ID NO: 69028 - RNA, 19 nt, Artificial Sequence
  Chemically synthesized
agugcgaggaaauggagga

SEQ ID NO: 69029 - RNA, 19 nt, Artificial Sequence
  Chemically synthesized
gcagacugcugcagauaag

SEQ ID NO: 69030 - RNA, 19 nt, Artificial Sequence
  Chemically synthesized
ugcagacugcugcagauaa

SEQ ID NO: 69031 - RNA, 19 nt, Artificial Sequence
  Chemically synthesized
cccuugcuuuacugcuaga

SEQ ID NO: 69032 - RNA, 19 nt, Artificial Sequence
  Chemically synthesized
agagcguaucgcucaugga

SEQ ID NO: 69033 - RNA, 19 nt, Artificial Sequence
  Chemically synthesized
ccagaagaaccaaauccag

SEQ ID NO: 69034 - RNA, 19 nt, Artificial Sequence
  Chemically synthesized
guucuauuacagagccaga

SEQ ID NO: 69035 - RNA, 19 nt, Artificial Sequence
  Chemically synthesized
guucaggagaaccaugaaa

SEQ ID NO: 69036 - RNA, 19 nt, Artificial Sequence
  Chemically synthesized
acauuuauuccaauagcca

SEQ ID NO: 69037 - RNA, 19 nt, Artificial Sequence
  Chemically synthesized
aacagcagcacccagagaa

SEQ ID NO: 69038 - RNA, 19 nt, Artificial Sequence
  Chemically synthesized
uguauaugguaagccugua

SEQ ID NO: 69039 - RNA, 19 nt, Artificial Sequence
  Chemically synthesized
cagacggaaguucucagca

SEQ ID NO: 69040 - RNA, 19 nt, Artificial Sequence
  Chemically synthesized
uguuccuacaaaaccaaaa

SEQ ID NO: 69041 - RNA, 19 nt, Artificial Sequence
  Chemically synthesized
gugaagauaucuugcggga

SEQ ID NO: 69042 - RNA, 19 nt, Artificial Sequence
  Chemically synthesized
cguccguucucaauguuug

SEQ ID NO: 69043 - RNA, 19 nt, Artificial Sequence
  Chemically synthesized
gcaaaaagaaaaucuacca

SEQ ID NO: 69044 - RNA, 19 nt, Artificial Sequence
  Chemically synthesized
gcagcucuacagcaaaaag

SEQ ID NO: 69045 - RNA, 19 nt, Artificial Sequence
  Chemically synthesized
guuccaguuacuccagaaa

SEQ ID NO: 69046 - RNA, 19 nt, Artificial Sequence
  Chemically synthesized
aaggagcugcagcuaagaa

SEQ ID NO: 69047 - RNA, 19 nt, Artificial Sequence
  Chemically synthesized
gcuugaucgccucuauaag

SEQ ID NO: 69048 - RNA, 19 nt, Artificial Sequence
  Chemically synthesized
gcaacaaguugcugagcag

SEQ ID NO: 69049 - RNA, 19 nt, Artificial Sequence
  Chemically synthesized
acaagaucagcgacaacag

SEQ ID NO: 69050 - RNA, 19 nt, Artificial Sequence
  Chemically synthesized
acuaaggaacagcgcuuaa

SEQ ID NO: 69051 - RNA, 19 nt, Artificial Sequence
  Chemically synthesized
gacucuugcugaacuucag

SEQ ID NO: 69052 - RNA, 19 nt, Artificial Sequence
  Chemically synthesized
aggagaacgguguuaauag

SEQ ID NO: 69053 - RNA, 19 nt, Artificial Sequence
  Chemically synthesized
aaucuuguuuguaggcuga

SEQ ID NO: 69054 - RNA, 19 nt, Artificial Sequence
  Chemically synthesized
cuguuaguugguugucagu

SEQ ID NO: 69055 - RNA, 19 nt, Artificial Sequence
  Chemically synthesized
uccuggugaauaucgaaga

SEQ ID NO: 69056 - RNA, 19 nt, Artificial Sequence
  Chemically synthesized
aaauaaagcaucuacguca

SEQ ID NO: 69057 - RNA, 19 nt, Artificial Sequence
  Chemically synthesized
cuugaaagcgaugaagaau

SEQ ID NO: 69058 - RNA, 19 nt, Artificial Sequence
  Chemically synthesized
cucaggauccaaguuuaaa

SEQ ID NO: 69059 - RNA, 19 nt, Artificial Sequence
  Chemically synthesized
gaaagaaggagacugcaug

SEQ ID NO: 69060 - RNA, 19 nt, Artificial Sequence
  Chemically synthesized
ugaaagaaggagacugcau

SEQ ID NO: 69061 - RNA, 19 nt, Artificial Sequence
  Chemically synthesized
acaugcagacugcugcaga

SEQ ID NO: 69062 - RNA, 19 nt, Artificial Sequence
  Chemically synthesized
auuacauugugcugccuca

SEQ ID NO: 69063 - RNA, 19 nt, Artificial Sequence
  Chemically synthesized
gcuagauucgucuuuggag

SEQ ID NO: 69064 - RNA, 19 nt, Artificial Sequence
  Chemically synthesized
guagaaauccagaauccau

SEQ ID NO: 69065 - RNA, 19 nt, Artificial Sequence
  Chemically synthesized
cauuuauuccaauagccag

SEQ ID NO: 69066 - RNA, 19 nt, Artificial Sequence
  Chemically synthesized
agcagcacccagagaacau

SEQ ID NO: 69067 - RNA, 19 nt, Artificial Sequence
  Chemically synthesized
ugcugcugcccagaaucaa

SEQ ID NO: 69068 - RNA, 19 nt, Artificial Sequence
  Chemically synthesized
cuguaauugcugcugccca

SEQ ID NO: 69069 - RNA, 19 nt, Artificial Sequence
  Chemically synthesized
agcaggcgccaggaaaaaa

SEQ ID NO: 69070 - RNA, 19 nt, Artificial Sequence
  Chemically synthesized
cuaaucagccaccuucaga

SEQ ID NO: 69071 - RNA, 19 nt, Artificial Sequence
  Chemically synthesized
auaucuugcgggaugcuca

SEQ ID NO: 69072 - RNA, 19 nt, Artificial Sequence
  Chemically synthesized
gaggaagaaccagagcagu

SEQ ID NO: 69073 - RNA, 19 nt, Artificial Sequence
  Chemically synthesized
uaugcagagacguggugga

SEQ ID NO: 69074 - RNA, 19 nt, Artificial Sequence
  Chemically synthesized
gcuucuguaccucaaagca

SEQ ID NO: 69075 - RNA, 19 nt, Artificial Sequence
  Chemically synthesized
cacaaacuaaaggcucuaa

SEQ ID NO: 69076 - RNA, 19 nt, Artificial Sequence
  Chemically synthesized
uccaguuacuccagaaaca

SEQ ID NO: 69077 - RNA, 19 nt, Artificial Sequence
  Chemically synthesized
ugaauaagcguaauucaga

SEQ ID NO: 69078 - RNA, 19 nt, Artificial Sequence
  Chemically synthesized
agaaguuccaguuacucca

SEQ ID NO: 69079 - RNA, 19 nt, Artificial Sequence
  Chemically synthesized
uauaaggagcugcagcuaa

SEQ ID NO: 69080 - RNA, 19 nt, Artificial Sequence
  Chemically synthesized
gaaacuuguggaggaaauu

SEQ ID NO: 69081 - RNA, 19 nt, Artificial Sequence
  Chemically synthesized
ggaacagaagagacuaagc

SEQ ID NO: 69082 - RNA, 19 nt, Artificial Sequence
  Chemically synthesized
ugcugagcaggagaaacuu

SEQ ID NO: 69083 - RNA, 19 nt, Artificial Sequence
  Chemically synthesized
ggcaaaaauuucacaagac

SEQ ID NO: 69084 - RNA, 19 nt, Artificial Sequence
  Chemically synthesized
ggauauguuccacguaacu

SEQ ID NO: 69085 - RNA, 19 nt, Artificial Sequence
  Chemically synthesized
gcgcuuugggauuaugaac

SEQ ID NO: 69086 - RNA, 19 nt, Artificial Sequence
  Chemically synthesized
gccaugaccuacagugaca

SEQ ID NO: 69087 - RNA, 19 nt, Artificial Sequence
  Chemically synthesized
aaggcaucacggcucuuca

SEQ ID NO: 69088 - RNA, 19 nt, Artificial Sequence
  Chemically synthesized
uuaugagguugaugaccca

SEQ ID NO: 69089 - RNA, 19 nt, Artificial Sequence
  Chemically synthesized
auacccauccaagucagcu

SEQ ID NO: 69090 - RNA, 19 nt, Artificial Sequence
  Chemically synthesized
aacguaguucuauuacaga

SEQ ID NO: 69091 - RNA, 19 nt, Artificial Sequence
  Chemically synthesized
ccuagaagccuuacgaaag

SEQ ID NO: 69092 - RNA, 19 nt, Artificial Sequence
  Chemically synthesized
guaccaccuccuguuccua

SEQ ID NO: 69093 - RNA, 19 nt, Artificial Sequence
  Chemically synthesized
agaaccagagcagugaaga

SEQ ID NO: 69094 - RNA, 19 nt, Artificial Sequence
  Chemically synthesized
uuugguacucugaggaaga

SEQ ID NO: 69095 - RNA, 19 nt, Artificial Sequence
  Chemically synthesized
gaugcaguagaccagucca

SEQ ID NO: 69096 - RNA, 19 nt, Artificial Sequence
  Chemically synthesized
augguuccuuggucauuca

SEQ ID NO: 69097 - RNA, 19 nt, Artificial Sequence
  Chemically synthesized
gcuguggaagaagaaggca

SEQ ID NO: 69098 - RNA, 19 nt, Artificial Sequence
  Chemically synthesized
cuacaacaacagagggagu

SEQ ID NO: 69099 - RNA, 19 nt, Artificial Sequence
  Chemically synthesized
caaucagucugcaguggcu

SEQ ID NO: 69100 - RNA, 19 nt, Artificial Sequence
  Chemically synthesized
cagcuagagaugcucaaga

SEQ ID NO: 69101 - RNA, 19 nt, Artificial Sequence
  Chemically synthesized
aacaaugagcagcacuuca

SEQ ID NO: 69102 - RNA, 19 nt, Artificial Sequence
  Chemically synthesized
aaguugcugagcaggagaa

SEQ ID NO: 69103 - RNA, 19 nt, Artificial Sequence
  Chemically synthesized
aaggaacagcgcuuaaagu

SEQ ID NO: 69104 - RNA, 19 nt, Artificial Sequence
  Chemically synthesized
uaaggaacagcgcuuaaag

SEQ ID NO: 69105 - RNA, 19 nt, Artificial Sequence
  Chemically synthesized
uugucaagaucauagcuga

SEQ ID NO: 69106 - RNA, 19 nt, Artificial Sequence
  Chemically synthesized
uugucuuuuguaucucaga

SEQ ID NO: 69107 - RNA, 19 nt, Artificial Sequence
  Chemically synthesized
guuuuuguagcaucuuaag

SEQ ID NO: 69108 - RNA, 19 nt, Artificial Sequence
  Chemically synthesized
gugaauaucgaagaaagga

SEQ ID NO: 69109 - RNA, 19 nt, Artificial Sequence
  Chemically synthesized
uuuauugggcaguugggaa

SEQ ID NO: 69110 - RNA, 19 nt, Artificial Sequence
  Chemically synthesized
cguguagcacucagauaag

SEQ ID NO: 69111 - RNA, 19 nt, Artificial Sequence
  Chemically synthesized
augaagaaugucucuagaa

SEQ ID NO: 69112 - RNA, 19 nt, Artificial Sequence
  Chemically synthesized
ugggauuaugaaccucaga

SEQ ID NO: 69113 - RNA, 19 nt, Artificial Sequence
  Chemically synthesized
uauggaguucaggagaaga

SEQ ID NO: 69114 - RNA, 19 nt, Artificial Sequence
  Chemically synthesized
aaucguuaaguuccuggua

SEQ ID NO: 69115 - RNA, 19 nt, Artificial Sequence
  Chemically synthesized
cacaugugcuugaugugua

SEQ ID NO: 69116 - RNA, 19 nt, Artificial Sequence
  Chemically synthesized
aaagcccaguagaaaucca

SEQ ID NO: 69117 - RNA, 19 nt, Artificial Sequence
  Chemically synthesized
uagaagccuuacgaaagaa

SEQ ID NO: 69118 - RNA, 19 nt, Artificial Sequence
  Chemically synthesized
aggagaaccaugaaaacga

SEQ ID NO: 69119 - RNA, 19 nt, Artificial Sequence
  Chemically synthesized
uaauugcugcugcccagaa

SEQ ID NO: 69120 - RNA, 19 nt, Artificial Sequence
  Chemically synthesized
acguccaguugcggauaau

SEQ ID NO: 69121 - RNA, 19 nt, Artificial Sequence
  Chemically synthesized
caaagacaccuuacuucca

SEQ ID NO: 69122 - RNA, 19 nt, Artificial Sequence
  Chemically synthesized
gacccuuucuccagguucu

SEQ ID NO: 69123 - RNA, 19 nt, Artificial Sequence
  Chemically synthesized
caagaugaugccgauguuu

SEQ ID NO: 69124 - RNA, 19 nt, Artificial Sequence
  Chemically synthesized
aguuguuccguccauggga

SEQ ID NO: 69125 - RNA, 19 nt, Artificial Sequence
  Chemically synthesized
agcaguugucaacaguugu

SEQ ID NO: 69126 - RNA, 19 nt, Artificial Sequence
  Chemically synthesized
ugauugccauuuggcugaa

SEQ ID NO: 69127 - RNA, 19 nt, Artificial Sequence
  Chemically synthesized
gcugcuucacaaacuaaag

SEQ ID NO: 69128 - RNA, 19 nt, Artificial Sequence
  Chemically synthesized
auucagaaguggcagucau

SEQ ID NO: 69129 - RNA, 19 nt, Artificial Sequence
  Chemically synthesized
augccaagcuacaacaaca

SEQ ID NO: 69130 - RNA, 19 nt, Artificial Sequence
  Chemically synthesized
ucaagagcagaaugccaag

SEQ ID NO: 69131 - RNA, 19 nt, Artificial Sequence
  Chemically synthesized
uagaagaacugaccaggca

SEQ ID NO: 69132 - RNA, 19 nt, Artificial Sequence
  Chemically synthesized
aaaguagaagaacugacca

SEQ ID NO: 69133 - RNA, 19 nt, Artificial Sequence
  Chemically synthesized
cagauugaagcccagcaac

SEQ ID NO: 69134 - RNA, 19 nt, Artificial Sequence
  Chemically synthesized
cagcagcaacagauugaag

SEQ ID NO: 69135 - RNA, 19 nt, Artificial Sequence
  Chemically synthesized
gaaucuuguuuguaggcug

SEQ ID NO: 69136 - RNA, 19 nt, Artificial Sequence
  Chemically synthesized
caucgcugucucugauugu

SEQ ID NO: 69137 - RNA, 19 nt, Artificial Sequence
  Chemically synthesized
guagcacucagauaaguau

SEQ ID NO: 69138 - RNA, 19 nt, Artificial Sequence
  Chemically synthesized
uuagcgugaugaaauaaag

SEQ ID NO: 69139 - RNA, 19 nt, Artificial Sequence
  Chemically synthesized
aggacauuuagcgugauga

SEQ ID NO: 69140 - RNA, 19 nt, Artificial Sequence
  Chemically synthesized
uguacccaagaauuaaacc

SEQ ID NO: 69141 - RNA, 19 nt, Artificial Sequence
  Chemically synthesized
uuuauggaguucaggagaa

SEQ ID NO: 69142 - RNA, 19 nt, Artificial Sequence
  Chemically synthesized
uuaaguuccugguacaguu

SEQ ID NO: 69143 - RNA, 19 nt, Artificial Sequence
  Chemically synthesized
aagcuuuuauaucagagga

SEQ ID NO: 69144 - RNA, 19 nt, Artificial Sequence
  Chemically synthesized
gaagccuuacgaaagaaac

SEQ ID NO: 69145 - RNA, 19 nt, Artificial Sequence
  Chemically synthesized
cacucagcccaacuaaauu

SEQ ID NO: 69146 - RNA, 19 nt, Artificial Sequence
  Chemically synthesized
caguucaggagaaccauga

SEQ ID NO: 69147 - RNA, 19 nt, Artificial Sequence
  Chemically synthesized
guaauugcugcugcccaga

SEQ ID NO: 69148 - RNA, 19 nt, Artificial Sequence
  Chemically synthesized
cccuuucuccagguucuaa

SEQ ID NO: 69149 - RNA, 19 nt, Artificial Sequence
  Chemically synthesized
ccguccaugggaacuaaac

SEQ ID NO: 69150 - RNA, 19 nt, Artificial Sequence
  Chemically synthesized
caacaguuguuccguccau

SEQ ID NO: 69151 - RNA, 19 nt, Artificial Sequence
  Chemically synthesized
uggacaaacuaaucagcca

SEQ ID NO: 69152 - RNA, 19 nt, Artificial Sequence
  Chemically synthesized
caccuccuguuccuacaaa

SEQ ID NO: 69153 - RNA, 19 nt, Artificial Sequence
  Chemically synthesized
gaugcucagguugcaaaua

SEQ ID NO: 69154 - RNA, 19 nt, Artificial Sequence
  Chemically synthesized
acgagcgucgaagagacaa

SEQ ID NO: 69155 - RNA, 19 nt, Artificial Sequence
  Chemically synthesized
ccaucauacccauccaagu

SEQ ID NO: 69156 - RNA, 19 nt, Artificial Sequence
  Chemically synthesized
uuauuguucacugacaacc

SEQ ID NO: 69157 - RNA, 19 nt, Artificial Sequence
  Chemically synthesized
cuuugucuugguuuaauuc

SEQ ID NO: 69158 - RNA, 19 nt, Artificial Sequence
  Chemically synthesized
ucuuuuuaaacuuggaucc

SEQ ID NO: 69159 - RNA, 19 nt, Artificial Sequence
  Chemically synthesized
uucaucacgcuaaaugucc

SEQ ID NO: 69160 - RNA, 19 nt, Artificial Sequence
  Chemically synthesized
uuugguuuaguucccaugg

SEQ ID NO: 69161 - RNA, 19 nt, Artificial Sequence
  Chemically synthesized
uucaucuucgucuucccug

SEQ ID NO: 69162 - RNA, 19 nt, Artificial Sequence
  Chemically synthesized
ucuugguccacucacaaug

SEQ ID NO: 69163 - RNA, 19 nt, Artificial Sequence
  Chemically synthesized
uuuucugaaggguggaagu

SEQ ID NO: 69164 - RNA, 19 nt, Artificial Sequence
  Chemically synthesized
uuuugguuuaguucccaug

SEQ ID NO: 69165 - RNA, 19 nt, Artificial Sequence
  Chemically synthesized
uucaauuuccuccacaagu

SEQ ID NO: 69166 - RNA, 19 nt, Artificial Sequence
  Chemically synthesized
ucugacuuccaaaucguug

SEQ ID NO: 69167 - RNA, 19 nt, Artificial Sequence
  Chemically synthesized
uuucccauugcuuagucuc

SEQ ID NO: 69168 - RNA, 19 nt, Artificial Sequence
  Chemically synthesized
uucugaaggguggaaguaa

SEQ ID NO: 69169 - RNA, 19 nt, Artificial Sequence
  Chemically synthesized
uuugucucuucgacgcucg

SEQ ID NO: 69170 - RNA, 19 nt, Artificial Sequence
  Chemically synthesized
uucuucgauauucaccagg

SEQ ID NO: 69171 - RNA, 19 nt, Artificial Sequence
  Chemically synthesized
uucuucaucgcuuucaagc

SEQ ID NO: 69172 - RNA, 19 nt, Artificial Sequence
  Chemically synthesized
uuucaugggcagcucauca

SEQ ID NO: 69173 - RNA, 19 nt, Artificial Sequence
  Chemically synthesized
ucuguuuugguuuuguagg

SEQ ID NO: 69174 - RNA, 19 nt, Artificial Sequence
  Chemically synthesized
auuuacaccaaacuguacc

SEQ ID NO: 69175 - RNA, 19 nt, Artificial Sequence
  Chemically synthesized
uccaucaucaacuugaucc

SEQ ID NO: 69176 - RNA, 19 nt, Artificial Sequence
  Chemically synthesized
cuugguuuaauucuugggu

SEQ ID NO: 69177 - RNA, 19 nt, Artificial Sequence
  Chemically synthesized
uuaaagucagcuaugaucu

SEQ ID NO: 69178 - RNA, 19 nt, Artificial Sequence
  Chemically synthesized
uuacgcaaguuuguccuuu

SEQ ID NO: 69179 - RNA, 19 nt, Artificial Sequence
  Chemically synthesized
uuuuagagccuuuaguuug

SEQ ID NO: 69180 - RNA, 19 nt, Artificial Sequence
  Chemically synthesized
uugagcaucucuagcugcc

SEQ ID NO: 69181 - RNA, 19 nt, Artificial Sequence
  Chemically synthesized
uucuucacugacaauauac

SEQ ID NO: 69182 - RNA, 19 nt, Artificial Sequence
  Chemically synthesized
uuaucugagugcuacacgg

SEQ ID NO: 69183 - RNA, 19 nt, Artificial Sequence
  Chemically synthesized
uucuucuggguuauucugg

SEQ ID NO: 69184 - RNA, 19 nt, Artificial Sequence
  Chemically synthesized
uuuauuugcaaccugagca

SEQ ID NO: 69185 - RNA, 19 nt, Artificial Sequence
  Chemically synthesized
uuggauccugagaucuugg

SEQ ID NO: 69186 - RNA, 19 nt, Artificial Sequence
  Chemically synthesized
uacaugaggcagcacaaug

SEQ ID NO: 69187 - RNA, 19 nt, Artificial Sequence
  Chemically synthesized
uuucugaaggguggaagua

SEQ ID NO: 69188 - RNA, 19 nt, Artificial Sequence
  Chemically synthesized
uucgauauucaccaggaac

SEQ ID NO: 69189 - RNA, 19 nt, Artificial Sequence
  Chemically synthesized
ucgcuuucaagcuacauug

SEQ ID NO: 69190 - RNA, 19 nt, Artificial Sequence
  Chemically synthesized
cugacuuggauggguauga

SEQ ID NO: 69191 - RNA, 19 nt, Artificial Sequence
  Chemically synthesized
guuuucugaaggguggaag

SEQ ID NO: 69192 - RNA, 19 nt, Artificial Sequence
  Chemically synthesized
uaugcugggagauagcagc

SEQ ID NO: 69193 - RNA, 19 nt, Artificial Sequence
  Chemically synthesized
auuugcaaccugagcaucc

SEQ ID NO: 69194 - RNA, 19 nt, Artificial Sequence
  Chemically synthesized
auuaacaccguucuccuuu

SEQ ID NO: 69195 - RNA, 19 nt, Artificial Sequence
  Chemically synthesized
uaagaugcuacaaaaacuc

SEQ ID NO: 69196 - RNA, 19 nt, Artificial Sequence
  Chemically synthesized
uucucuucuagagacauuc

SEQ ID NO: 69197 - RNA, 19 nt, Artificial Sequence
  Chemically synthesized
aauucuuggguacaguccc

SEQ ID NO: 69198 - RNA, 19 nt, Artificial Sequence
  Chemically synthesized
augauugucaugcagucuc

SEQ ID NO: 69199 - RNA, 19 nt, Artificial Sequence
  Chemically synthesized
uucauaaucccaaagcgca

SEQ ID NO: 69200 - RNA, 19 nt, Artificial Sequence
  Chemically synthesized
ucugaaggguggaaguaag

SEQ ID NO: 69201 - RNA, 19 nt, Artificial Sequence
  Chemically synthesized
uuuugacacagccaggacg

SEQ ID NO: 69202 - RNA, 19 nt, Artificial Sequence
  Chemically synthesized
uaaaauucagccuacaaac

SEQ ID NO: 69203 - RNA, 19 nt, Artificial Sequence
  Chemically synthesized
uuaucauuaaggcgcgccc

SEQ ID NO: 69204 - RNA, 19 nt, Artificial Sequence
  Chemically synthesized
uucaggaaccagagagacc

SEQ ID NO: 69205 - RNA, 19 nt, Artificial Sequence
  Chemically synthesized
uuuaguugggcugaguggc

SEQ ID NO: 69206 - RNA, 19 nt, Artificial Sequence
  Chemically synthesized
uuucuugcuuagaaccugg

SEQ ID NO: 69207 - RNA, 19 nt, Artificial Sequence
  Chemically synthesized
uauagggaccuacugcagc

SEQ ID NO: 69208 - RNA, 19 nt, Artificial Sequence
  Chemically synthesized
uagcuuggcauucugcucu

SEQ ID NO: 69209 - RNA, 19 nt, Artificial Sequence
  Chemically synthesized
uucuguuccacguggccuu

SEQ ID NO: 69210 - RNA, 19 nt, Artificial Sequence
  Chemically synthesized
uugcuguugucgcugaucu

SEQ ID NO: 69211 - RNA, 19 nt, Artificial Sequence
  Chemically synthesized
aucugcagcagucugcaug

SEQ ID NO: 69212 - RNA, 19 nt, Artificial Sequence
  Chemically synthesized
uuccacguggccuuuaagu

SEQ ID NO: 69213 - RNA, 19 nt, Artificial Sequence
  Chemically synthesized
uuuaagugcucucacuuuu

SEQ ID NO: 69214 - RNA, 19 nt, Artificial Sequence
  Chemically synthesized
uuucagguucuggacugcc

SEQ ID NO: 69215 - RNA, 19 nt, Artificial Sequence
  Chemically synthesized
uguagagcugccuucuucu

SEQ ID NO: 69216 - RNA, 19 nt, Artificial Sequence
  Chemically synthesized
uuucuuagcugcagcuccu

SEQ ID NO: 69217 - RNA, 19 nt, Artificial Sequence
  Chemically synthesized
aucaucuuggacccgaacc

SEQ ID NO: 69218 - RNA, 19 nt, Artificial Sequence
  Chemically synthesized
uacacgguaagaaacaucg

SEQ ID NO: 69219 - RNA, 19 nt, Artificial Sequence
  Chemically synthesized
uucgucuucccuguggaug

SEQ ID NO: 69220 - RNA, 19 nt, Artificial Sequence
  Chemically synthesized
ugguccacucacaaugucc

SEQ ID NO: 69221 - RNA, 19 nt, Artificial Sequence
  Chemically synthesized
uugugaagagccgugaugc

SEQ ID NO: 69222 - RNA, 19 nt, Artificial Sequence
  Chemically synthesized
uuuaccaggaggcagagag

SEQ ID NO: 69223 - RNA, 19 nt, Artificial Sequence
  Chemically synthesized
uuucugagcuggcagucac

SEQ ID NO: 69224 - RNA, 19 nt, Artificial Sequence
  Chemically synthesized
uuugcaaccugagcauccc

SEQ ID NO: 69225 - RNA, 19 nt, Artificial Sequence
  Chemically synthesized
uuucuuuuugcuguagagc

SEQ ID NO: 69226 - RNA, 19 nt, Artificial Sequence
  Chemically synthesized
uuuugcuguagagcugccu

SEQ ID NO: 69227 - RNA, 19 nt, Artificial Sequence
  Chemically synthesized
uugcuuagucucuucuguu

SEQ ID NO: 69228 - RNA, 19 nt, Artificial Sequence
  Chemically synthesized
uuacggguaagucuguagc

SEQ ID NO: 69229 - RNA, 19 nt, Artificial Sequence
  Chemically synthesized
gugaauucuucaauccuuc

SEQ ID NO: 69230 - RNA, 19 nt, Artificial Sequence
  Chemically synthesized
uaggucauggcaaacacag

SEQ ID NO: 69231 - RNA, 19 nt, Artificial Sequence
  Chemically synthesized
uucaugacgaaggaagaag

SEQ ID NO: 69232 - RNA, 19 nt, Artificial Sequence
  Chemically synthesized
uuguccuuuuaccaggagg

SEQ ID NO: 69233 - RNA, 19 nt, Artificial Sequence
  Chemically synthesized
uugacaacugcugagaacu

SEQ ID NO: 69234 - RNA, 19 nt, Artificial Sequence
  Chemically synthesized
auauucaccaggaacuuuu

SEQ ID NO: 69235 - RNA, 19 nt, Artificial Sequence
  Chemically synthesized
ucuggauuugguucuucug

SEQ ID NO: 69236 - RNA, 19 nt, Artificial Sequence
  Chemically synthesized
uuccucugacuuccaaauc

SEQ ID NO: 69237 - RNA, 19 nt, Artificial Sequence
  Chemically synthesized
uuugcuguagagcugccuu

SEQ ID NO: 69238 - RNA, 19 nt, Artificial Sequence
  Chemically synthesized
ucaaacacucccucuguug

SEQ ID NO: 69239 - RNA, 19 nt, Artificial Sequence
  Chemically synthesized
uuuuuaaacuuggauccug

SEQ ID NO: 69240 - RNA, 19 nt, Artificial Sequence
  Chemically synthesized
ucaaauucucccuccaaag

SEQ ID NO: 69241 - RNA, 19 nt, Artificial Sequence
  Chemically synthesized
uuccaaaucguugaagaac

SEQ ID NO: 69242 - RNA, 19 nt, Artificial Sequence
  Chemically synthesized
uauuuggcccauuaggacc

SEQ ID NO: 69243 - RNA, 19 nt, Artificial Sequence
  Chemically synthesized
ucugguuucgguaaggauu

SEQ ID NO: 69244 - RNA, 19 nt, Artificial Sequence
  Chemically synthesized
uugguuuuguaggaacagg

SEQ ID NO: 69245 - RNA, 19 nt, Artificial Sequence
  Chemically synthesized
ugugaagugcugcucauug

SEQ ID NO: 69246 - RNA, 19 nt, Artificial Sequence
  Chemically synthesized
ucgauauucaccaggaacu

SEQ ID NO: 69247 - RNA, 19 nt, Artificial Sequence
  Chemically synthesized
uucaucgcuuucaagcuac

SEQ ID NO: 69248 - RNA, 19 nt, Artificial Sequence
  Chemically synthesized
uucugcucuugauucaauu

SEQ ID NO: 69249 - RNA, 19 nt, Artificial Sequence
  Chemically synthesized
ugcagacugauugucaugg

SEQ ID NO: 69250 - RNA, 19 nt, Artificial Sequence
  Chemically synthesized
ucaucuguucaauuuccuc

SEQ ID NO: 69251 - RNA, 19 nt, Artificial Sequence
  Chemically synthesized
ucuccugcucagcaacuug

SEQ ID NO: 69252 - RNA, 19 nt, Artificial Sequence
  Chemically synthesized
uuguugcugggcuucaauc

SEQ ID NO: 69253 - RNA, 19 nt, Artificial Sequence
  Chemically synthesized
ucuguguggaaguuucagg

SEQ ID NO: 69254 - RNA, 19 nt, Artificial Sequence
  Chemically synthesized
uggcaugucacuguucucu

SEQ ID NO: 69255 - RNA, 19 nt, Artificial Sequence
  Chemically synthesized
gcugacuuggauggguaug

SEQ ID NO: 69256 - RNA, 19 nt, Artificial Sequence
  Chemically synthesized
ugcuguugcguauacaugg

SEQ ID NO: 69257 - RNA, 19 nt, Artificial Sequence
  Chemically synthesized
uuugagguacagaagcaga

SEQ ID NO: 69258 - RNA, 19 nt, Artificial Sequence
  Chemically synthesized
uuggcuugggaaaagaucu

SEQ ID NO: 69259 - RNA, 19 nt, Artificial Sequence
  Chemically synthesized
uucuuuuugcuguagagcu

SEQ ID NO: 69260 - RNA, 19 nt, Artificial Sequence
  Chemically synthesized
uuagcuuccugauucucag

SEQ ID NO: 69261 - RNA, 19 nt, Artificial Sequence
  Chemically synthesized
uccacucacaaugucccug

SEQ ID NO: 69262 - RNA, 19 nt, Artificial Sequence
  Chemically synthesized
uuccaugagcgauacgcuc

SEQ ID NO: 69263 - RNA, 19 nt, Artificial Sequence
  Chemically synthesized
aguuuuacgcaaguuuguc

SEQ ID NO: 69264 - RNA, 19 nt, Artificial Sequence
  Chemically synthesized
cuucguuccucugacuucc

SEQ ID NO: 69265 - RNA, 19 nt, Artificial Sequence
  Chemically synthesized
ucguugaagaacaucaaac

SEQ ID NO: 69266 - RNA, 19 nt, Artificial Sequence
  Chemically synthesized
ucugauauaaaagcuucug

SEQ ID NO: 69267 - RNA, 19 nt, Artificial Sequence
  Chemically synthesized
acaacugcugagaacuucc

SEQ ID NO: 69268 - RNA, 19 nt, Artificial Sequence
  Chemically synthesized
ucaaacauugagaacggac

SEQ ID NO: 69269 - RNA, 19 nt, Artificial Sequence
  Chemically synthesized
uccaugacugccacuucug

SEQ ID NO: 69270 - RNA, 19 nt, Artificial Sequence
  Chemically synthesized
ugccauuuccugaaguuca

SEQ ID NO: 69271 - RNA, 19 nt, Artificial Sequence
  Chemically synthesized
uuguucacugacaaccaac

SEQ ID NO: 69272 - RNA, 19 nt, Artificial Sequence
  Chemically synthesized
uuuacuagacaggauucuu

SEQ ID NO: 69273 - RNA, 19 nt, Artificial Sequence
  Chemically synthesized
agaaacaucggcaucaucu

SEQ ID NO: 69274 - RNA, 19 nt, Artificial Sequence
  Chemically synthesized
uugaacuugcugccacggu

SEQ ID NO: 69275 - RNA, 19 nt, Artificial Sequence
  Chemically synthesized
uuguagcuuggcauucugc

SEQ ID NO: 69276 - RNA, 19 nt, Artificial Sequence
  Chemically synthesized
uuucuccugcucagcaacu

SEQ ID NO: 69277 - RNA, 19 nt, Artificial Sequence
  Chemically synthesized
uaaauguccucuaauggug

SEQ ID NO: 69278 - RNA, 19 nt, Artificial Sequence
  Chemically synthesized
ugaauucuucaauccuuca

SEQ ID NO: 69279 - RNA, 19 nt, Artificial Sequence
  Chemically synthesized
ucuugugaaauuuuugcca

SEQ ID NO: 69280 - RNA, 19 nt, Artificial Sequence
  Chemically synthesized
auucgauuucaucuucguc

SEQ ID NO: 69281 - RNA, 19 nt, Artificial Sequence
  Chemically synthesized
uuucaucuucgucuucccu

SEQ ID NO: 69282 - RNA, 19 nt, Artificial Sequence
  Chemically synthesized
uguccuuuuaccaggaggc

SEQ ID NO: 69283 - RNA, 19 nt, Artificial Sequence
  Chemically synthesized
ugacuuggauggguaugau

SEQ ID NO: 69284 - RNA, 19 nt, Artificial Sequence
  Chemically synthesized
uucaugguucuccugaacu

SEQ ID NO: 69285 - RNA, 19 nt, Artificial Sequence
  Chemically synthesized
auugucaugguggcugucg

SEQ ID NO: 69286 - RNA, 19 nt, Artificial Sequence
  Chemically synthesized
uucuugagcaucucuagcu

SEQ ID NO: 69287 - RNA, 19 nt, Artificial Sequence
  Chemically synthesized
uuuccuccacaaguuuccc

SEQ ID NO: 69288 - RNA, 19 nt, Artificial Sequence
  Chemically synthesized
uuaagugcucucacuuuuu

SEQ ID NO: 69289 - RNA, 19 nt, Artificial Sequence
  Chemically synthesized
uuuagcuuagcuuccugau

SEQ ID NO: 69290 - RNA, 19 nt, Artificial Sequence
  Chemically synthesized
uucuuggguacagucccag

SEQ ID NO: 69291 - RNA, 19 nt, Artificial Sequence
  Chemically synthesized
uacguggaacauaucccuc

SEQ ID NO: 69292 - RNA, 19 nt, Artificial Sequence
  Chemically synthesized
ucaugacgaaggaagaagc

SEQ ID NO: 69293 - RNA, 19 nt, Artificial Sequence
  Chemically synthesized
ucccucaggcucauaauca

SEQ ID NO: 69294 - RNA, 19 nt, Artificial Sequence
  Chemically synthesized
uauggauucuggauuucua

SEQ ID NO: 69295 - RNA, 19 nt, Artificial Sequence
  Chemically synthesized
uuucguaaggcuucuaggu

SEQ ID NO: 69296 - RNA, 19 nt, Artificial Sequence
  Chemically synthesized
uucguaaggcuucuagguc

SEQ ID NO: 69297 - RNA, 19 nt, Artificial Sequence
  Chemically synthesized
ugaaggguggaaguaaggu

SEQ ID NO: 69298 - RNA, 19 nt, Artificial Sequence
  Chemically synthesized
uuugguuuuguaggaacag

SEQ ID NO: 69299 - RNA, 19 nt, Artificial Sequence
  Chemically synthesized
uugaaggacuccaaucagg

SEQ ID NO: 69300 - RNA, 19 nt, Artificial Sequence
  Chemically synthesized
uagacgacuggauauaggg

SEQ ID NO: 69301 - RNA, 19 nt, Artificial Sequence
  Chemically synthesized
uauagaggcgaucaagcuc

SEQ ID NO: 69302 - RNA, 19 nt, Artificial Sequence
  Chemically synthesized
cuuagcuuccugauucuca

SEQ ID NO: 69303 - RNA, 19 nt, Artificial Sequence
  Chemically synthesized
uugccagcaauuguugcug

SEQ ID NO: 69304 - RNA, 19 nt, Artificial Sequence
  Chemically synthesized
uguugcugggcuucaaucu

SEQ ID NO: 69305 - RNA, 19 nt, Artificial Sequence
  Chemically synthesized
uuacugguaccguagcuua

SEQ ID NO: 69306 - RNA, 19 nt, Artificial Sequence
  Chemically synthesized
cuccuuaucauuaaggcgc

SEQ ID NO: 69307 - RNA, 19 nt, Artificial Sequence
  Chemically synthesized
aagcugacuuggaugggua

SEQ ID NO: 69308 - RNA, 19 nt, Artificial Sequence
  Chemically synthesized
ugggugcugcuguugauuc

SEQ ID NO: 69309 - RNA, 19 nt, Artificial Sequence
  Chemically synthesized
cugguaugagucuugguca

SEQ ID NO: 69310 - RNA, 19 nt, Artificial Sequence
  Chemically synthesized
uugagaacggacgcacuuu

SEQ ID NO: 69311 - RNA, 19 nt, Artificial Sequence
  Chemically synthesized
cucugaagccugaaugacc

SEQ ID NO: 69312 - RNA, 19 nt, Artificial Sequence
  Chemically synthesized
uuccaucagaugaaacugg

SEQ ID NO: 69313 - RNA, 19 nt, Artificial Sequence
  Chemically synthesized
ucuacuuuugacacagcca

SEQ ID NO: 69314 - RNA, 19 nt, Artificial Sequence
  Chemically synthesized
cuagagacauucuucaucg

SEQ ID NO: 69315 - RNA, 19 nt, Artificial Sequence
  Chemically synthesized
agucuugugaaauuuuugc

SEQ ID NO: 69316 - RNA, 19 nt, Artificial Sequence
  Chemically synthesized
uuacguggaacauaucccu

SEQ ID NO: 69317 - RNA, 19 nt, Artificial Sequence
  Chemically synthesized
acguggaacauaucccucc

SEQ ID NO: 69318 - RNA, 19 nt, Artificial Sequence
  Chemically synthesized
ugucaugcagucuccuucu

SEQ ID NO: 69319 - RNA, 19 nt, Artificial Sequence
  Chemically synthesized
aauguaauggaguccaucc

SEQ ID NO: 69320 - RNA, 19 nt, Artificial Sequence
  Chemically synthesized
ugaaaaguguggcccucug

SEQ ID NO: 69321 - RNA, 19 nt, Artificial Sequence
  Chemically synthesized
uggagaaagggucuggucu

SEQ ID NO: 69322 - RNA, 19 nt, Artificial Sequence
  Chemically synthesized
uuggccaaccgaagguaug

SEQ ID NO: 69323 - RNA, 19 nt, Artificial Sequence
  Chemically synthesized
ugauccagagcauucccag

SEQ ID NO: 69324 - RNA, 19 nt, Artificial Sequence
  Chemically synthesized
uugggaaaagaucugcauu

SEQ ID NO: 69325 - RNA, 19 nt, Artificial Sequence
  Chemically synthesized
acgcuuauccaugacugcc

SEQ ID NO: 69326 - RNA, 19 nt, Artificial Sequence
  Chemically synthesized
ugcagcuccuuauagaggc

SEQ ID NO: 69327 - RNA, 19 nt, Artificial Sequence
  Chemically synthesized
uuagcuuagcuuccugauu

SEQ ID NO: 69328 - RNA, 19 nt, Artificial Sequence
  Chemically synthesized
uuaguugccagcaauuguu

SEQ ID NO: 69329 - RNA, 19 nt, Artificial Sequence
  Chemically synthesized
uauuguucacugacaacca

SEQ ID NO: 69330 - RNA, 19 nt, Artificial Sequence
  Chemically synthesized
agcugauuucccaacugcc

SEQ ID NO: 69331 - RNA, 19 nt, Artificial Sequence
  Chemically synthesized
ucaugcagucuccuucuuu

SEQ ID NO: 69332 - RNA, 19 nt, Artificial Sequence
  Chemically synthesized
uucuuucaugggcagcuca

SEQ ID NO: 69333 - RNA, 19 nt, Artificial Sequence
  Chemically synthesized
aucccaaagcgcauaaaug

SEQ ID NO: 69334 - RNA, 19 nt, Artificial Sequence
  Chemically synthesized
acagagauggucuccaugg

SEQ ID NO: 69335 - RNA, 19 nt, Artificial Sequence
  Chemically synthesized
uuuagaggccuuggugcgu

SEQ ID NO: 69336 - RNA, 19 nt, Artificial Sequence
  Chemically synthesized
uaaggcuucuaggucagca

SEQ ID NO: 69337 - RNA, 19 nt, Artificial Sequence
  Chemically synthesized
uucgguaaggauuagauaa

SEQ ID NO: 69338 - RNA, 19 nt, Artificial Sequence
  Chemically synthesized
uuuuguaggaacaggaggu

SEQ ID NO: 69339 - RNA, 19 nt, Artificial Sequence
  Chemically synthesized
ugaaggacuccaaucaggg

SEQ ID NO: 69340 - RNA, 19 nt, Artificial Sequence
  Chemically synthesized
uuuagagccuuuaguuugu

SEQ ID NO: 69341 - RNA, 19 nt, Artificial Sequence
  Chemically synthesized
ucacugacaauauacaagu

SEQ ID NO: 69342 - RNA, 19 nt, Artificial Sequence
  Chemically synthesized
uccuucauucucuucuaga

SEQ ID NO: 69343 - RNA, 19 nt, Artificial Sequence
  Chemically synthesized
uaauggaguccauccauca

SEQ ID NO: 69344 - RNA, 19 nt, Artificial Sequence
  Chemically synthesized
augcucaccgagucuucuc

SEQ ID NO: 69345 - RNA, 19 nt, Artificial Sequence
  Chemically synthesized
uggagauuugggcuguugu

SEQ ID NO: 69346 - RNA, 19 nt, Artificial Sequence
  Chemically synthesized
ucagaguaccaaaggaagg

SEQ ID NO: 69347 - RNA, 19 nt, Artificial Sequence
  Chemically synthesized
uuguuguagcuuggcauuc

SEQ ID NO: 69348 - RNA, 19 nt, Artificial Sequence
  Chemically synthesized
uugucaugguggcugucga

SEQ ID NO: 69349 - RNA, 19 nt, Artificial Sequence
  Chemically synthesized
ucuaauggugaauucuuca

SEQ ID NO: 69350 - RNA, 19 nt, Artificial Sequence
  Chemically synthesized
uaaacuuggauccugagau

SEQ ID NO: 69351 - RNA, 19 nt, Artificial Sequence
  Chemically synthesized
uucugagguucauaauccc

SEQ ID NO: 69352 - RNA, 19 nt, Artificial Sequence
  Chemically synthesized
uucguuccucugacuucca

SEQ ID NO: 69353 - RNA, 19 nt, Artificial Sequence
  Chemically synthesized
ucaggaaccagagagacca

SEQ ID NO: 69354 - RNA, 19 nt, Artificial Sequence
  Chemically synthesized
auuuggcccauuaggaccc

SEQ ID NO: 69355 - RNA, 19 nt, Artificial Sequence
  Chemically synthesized
ucuaggucagcaucacucu

SEQ ID NO: 69356 - RNA, 19 nt, Artificial Sequence
  Chemically synthesized
ucauguugggcagugucug

SEQ ID NO: 69357 - RNA, 19 nt, Artificial Sequence
  Chemically synthesized
uugggcagugucuguauuu

SEQ ID NO: 69358 - RNA, 19 nt, Artificial Sequence
  Chemically synthesized
ucuuuuugcuguagagcug

SEQ ID NO: 69359 - RNA, 19 nt, Artificial Sequence
  Chemically synthesized
uggaacuucugugaagugc

SEQ ID NO: 69360 - RNA, 19 nt, Artificial Sequence
  Chemically synthesized
cugauugucaugguggcug

SEQ ID NO: 69361 - RNA, 19 nt, Artificial Sequence
  Chemically synthesized
ucagcuauuucuuuuagcc

SEQ ID NO: 69362 - RNA, 19 nt, Artificial Sequence
  Chemically synthesized
ccuuucuucgauauucacc

SEQ ID NO: 69363 - RNA, 19 nt, Artificial Sequence
  Chemically synthesized
uucuguguggaaguuucag

SEQ ID NO: 69364 - RNA, 19 nt, Artificial Sequence
  Chemically synthesized
ucaugggcagcucaucauc

SEQ ID NO: 69365 - RNA, 19 nt, Artificial Sequence
  Chemically synthesized
uugggagcacugaguguag

SEQ ID NO: 69366 - RNA, 19 nt, Artificial Sequence
  Chemically synthesized
auauggauucuggauuucu

SEQ ID NO: 69367 - RNA, 19 nt, Artificial Sequence
  Chemically synthesized
aaaucguugaagaacauca

SEQ ID NO: 69368 - RNA, 19 nt, Artificial Sequence
  Chemically synthesized
ucgcucauuauccgcaacu

SEQ ID NO: 69369 - RNA, 19 nt, Artificial Sequence
  Chemically synthesized
aguuuuuuccuggcgccug

SEQ ID NO: 69370 - RNA, 19 nt, Artificial Sequence
  Chemically synthesized
uguagcuuggcauucugcu

SEQ ID NO: 69371 - RNA, 19 nt, Artificial Sequence
  Chemically synthesized
guuucuuagcugcagcucc

SEQ ID NO: 69372 - RNA, 19 nt, Artificial Sequence
  Chemically synthesized
aaagaaauugggagcacug

SEQ ID NO: 69373 - RNA, 19 nt, Artificial Sequence
  Chemically synthesized
aucacuaucagcagcauuu

SEQ ID NO: 69374 - RNA, 19 nt, Artificial Sequence
  Chemically synthesized
ucucuguacaaggucaaau

SEQ ID NO: 69375 - RNA, 19 nt, Artificial Sequence
  Chemically synthesized
augagcgauacgcucugag

SEQ ID NO: 69376 - RNA, 19 nt, Artificial Sequence
  Chemically synthesized
uuuacgcaaguuuguccuu

SEQ ID NO: 69377 - RNA, 19 nt, Artificial Sequence
  Chemically synthesized
uucuggguuauucuggaga

SEQ ID NO: 69378 - RNA, 19 nt, Artificial Sequence
  Chemically synthesized
uuucgggcuccacauguaa

SEQ ID NO: 69379 - RNA, 19 nt, Artificial Sequence
  Chemically synthesized
uauggugguccucugauau

SEQ ID NO: 69380 - RNA, 19 nt, Artificial Sequence
  Chemically synthesized
uucagguucuggacugcca

SEQ ID NO: 69381 - RNA, 19 nt, Artificial Sequence
  Chemically synthesized
uaaugucugaagguggcug

SEQ ID NO: 69382 - RNA, 19 nt, Artificial Sequence
  Chemically synthesized
ugaagccugaaugaccaag

SEQ ID NO: 69383 - RNA, 19 nt, Artificial Sequence
  Chemically synthesized
aucucuagcugccugguca

SEQ ID NO: 69384 - RNA, 19 nt, Artificial Sequence
  Chemically synthesized
uccacaaguuucccauugc

SEQ ID NO: 69385 - RNA, 19 nt, Artificial Sequence
  Chemically synthesized
ucuaauuacugguaccgua

SEQ ID NO: 69386 - RNA, 19 nt, Artificial Sequence
  Chemically synthesized
aucgcuuucaagcuacauu

SEQ ID NO: 69387 - RNA, 19 nt, Artificial Sequence
  Chemically synthesized
uucccuguggaugauuguc

SEQ ID NO: 69388 - RNA, 19 nt, Artificial Sequence
  Chemically synthesized
ucuccugaacuccauaaag

SEQ ID NO: 69389 - RNA, 19 nt, Artificial Sequence
  Chemically synthesized
uacaccaaacuguaccagg

SEQ ID NO: 69390 - RNA, 19 nt, Artificial Sequence
  Chemically synthesized
ccaguuuuacgcaaguuug

SEQ ID NO: 69391 - RNA, 19 nt, Artificial Sequence
  Chemically synthesized
ugucacuguucucuguacu

SEQ ID NO: 69392 - RNA, 19 nt, Artificial Sequence
  Chemically synthesized
uucuggauuucuacugggc

SEQ ID NO: 69393 - RNA, 19 nt, Artificial Sequence
  Chemically synthesized
ucuacugggcuuucugagc

SEQ ID NO: 69394 - RNA, 19 nt, Artificial Sequence
  Chemically synthesized
acagaagcugacuuggaug

SEQ ID NO: 69395 - RNA, 19 nt, Artificial Sequence
  Chemically synthesized
gacuuggauggguaugaug

SEQ ID NO: 69396 - RNA, 19 nt, Artificial Sequence
  Chemically synthesized
uguuucagguucuggacug

SEQ ID NO: 69397 - RNA, 19 nt, Artificial Sequence
  Chemically synthesized
cugaaggguggaaguaagg

SEQ ID NO: 69398 - RNA, 19 nt, Artificial Sequence
  Chemically synthesized
acuuccgucuggcuuaaug

SEQ ID NO: 69399 - RNA, 19 nt, Artificial Sequence
  Chemically synthesized
ugaagguggcugauuaguu

SEQ ID NO: 69400 - RNA, 19 nt, Artificial Sequence
  Chemically synthesized
accacgucucugcauauug

SEQ ID NO: 69401 - RNA, 19 nt, Artificial Sequence
  Chemically synthesized
uggauuuuagagccuuuag

SEQ ID NO: 69402 - RNA, 19 nt, Artificial Sequence
  Chemically synthesized
auauuguuucuggaguaac

SEQ ID NO: 69403 - RNA, 19 nt, Artificial Sequence
  Chemically synthesized
uggauauagggaccuacug

SEQ ID NO: 69404 - RNA, 19 nt, Artificial Sequence
  Chemically synthesized
uucuucuuccacagccggu

SEQ ID NO: 69405 - RNA, 19 nt, Artificial Sequence
  Chemically synthesized
uucuggaguaacuggaacu

SEQ ID NO: 69406 - RNA, 19 nt, Artificial Sequence
  Chemically synthesized
acacgcuuauccaugacug

SEQ ID NO: 69407 - RNA, 19 nt, Artificial Sequence
  Chemically synthesized
ucuagcugccuggucaguu

SEQ ID NO: 69408 - RNA, 19 nt, Artificial Sequence
  Chemically synthesized
uccuccacaaguuucccau

SEQ ID NO: 69409 - RNA, 19 nt, Artificial Sequence
  Chemically synthesized
uuccugauucucagcuauu

SEQ ID NO: 69410 - RNA, 19 nt, Artificial Sequence
  Chemically synthesized
cuuguugcuguugucgcug

SEQ ID NO: 69411 - RNA, 19 nt, Artificial Sequence
  Chemically synthesized
uuuccugaaguucagcaag

SEQ ID NO: 69412 - RNA, 19 nt, Artificial Sequence
  Chemically synthesized
aauauuacggguaagucug

SEQ ID NO: 69413 - RNA, 19 nt, Artificial Sequence
  Chemically synthesized
ucuguagcaaguuucuaau

SEQ ID NO: 69414 - RNA, 19 nt, Artificial Sequence
  Chemically synthesized
uacaagugugcagugccuu

SEQ ID NO: 69415 - RNA, 19 nt, Artificial Sequence
  Chemically synthesized
acaagugugcagugccuuc

SEQ ID NO: 69416 - RNA, 19 nt, Artificial Sequence
  Chemically synthesized
ucaauccuucauucucuuc

SEQ ID NO: 69417 - RNA, 19 nt, Artificial Sequence
  Chemically synthesized
auaucccuccuuaucauua

SEQ ID NO: 69418 - RNA, 19 nt, Artificial Sequence
  Chemically synthesized
uucaugggcagcucaucau

SEQ ID NO: 69419 - RNA, 19 nt, Artificial Sequence
  Chemically synthesized
uccauuuccucgcacuuau

SEQ ID NO: 69420 - RNA, 19 nt, Artificial Sequence
  Chemically synthesized
uguuacaugaggcagcaca

SEQ ID NO: 69421 - RNA, 19 nt, Artificial Sequence
  Chemically synthesized
auggaguccauccaucacu

SEQ ID NO: 69422 - RNA, 19 nt, Artificial Sequence
  Chemically synthesized
uuuacaccaaacuguacca

SEQ ID NO: 69423 - RNA, 19 nt, Artificial Sequence
  Chemically synthesized
uuucuguguggccugcaca

SEQ ID NO: 69424 - RNA, 19 nt, Artificial Sequence
  Chemically synthesized
ucucccuccaaagacgaau

SEQ ID NO: 69425 - RNA, 19 nt, Artificial Sequence
  Chemically synthesized
auuugggcuguugucuggg

SEQ ID NO: 69426 - RNA, 19 nt, Artificial Sequence
  Chemically synthesized
uucugagcuggcagucaca

SEQ ID NO: 69427 - RNA, 19 nt, Artificial Sequence
  Chemically synthesized
ugaauauuuggcccauuag

SEQ ID NO: 69428 - RNA, 19 nt, Artificial Sequence
  Chemically synthesized
uuagauaagaaaggcagua

SEQ ID NO: 69429 - RNA, 19 nt, Artificial Sequence
  Chemically synthesized
uuuaguucccauggacgga

SEQ ID NO: 69430 - RNA, 19 nt, Artificial Sequence
  Chemically synthesized
uucccauggacggaacaac

SEQ ID NO: 69431 - RNA, 19 nt, Artificial Sequence
  Chemically synthesized
uuguaggaacaggaggugg

SEQ ID NO: 69432 - RNA, 19 nt, Artificial Sequence
  Chemically synthesized
cuucucuuucucccucagc

SEQ ID NO: 69433 - RNA, 19 nt, Artificial Sequence
  Chemically synthesized
ucucauguugggcaguguc

SEQ ID NO: 69434 - RNA, 19 nt, Artificial Sequence
  Chemically synthesized
ucgauccugccguucuuga

SEQ ID NO: 69435 - RNA, 19 nt, Artificial Sequence
  Chemically synthesized
agcaagagucagauccauc

SEQ ID NO: 69436 - RNA, 19 nt, Artificial Sequence
  Chemically synthesized
ucagagacagcgaugugac

SEQ ID NO: 69437 - RNA, 19 nt, Artificial Sequence
  Chemically synthesized
ucccuguggaugauuguca

SEQ ID NO: 69438 - RNA, 19 nt, Artificial Sequence
  Chemically synthesized
cuguggaugauugucaugc

SEQ ID NO: 69439 - RNA, 19 nt, Artificial Sequence
  Chemically synthesized
ucuccuucuuucaugggca

SEQ ID NO: 69440 - RNA, 19 nt, Artificial Sequence
  Chemically synthesized
uguagccuuccuccauuuc

SEQ ID NO: 69441 - RNA, 19 nt, Artificial Sequence
  Chemically synthesized
uuccucgcacuuaucugca

SEQ ID NO: 69442 - RNA, 19 nt, Artificial Sequence
  Chemically synthesized
cuccagguacacaucaagc

SEQ ID NO: 69443 - RNA, 19 nt, Artificial Sequence
  Chemically synthesized
uggguuauucuggagauuu

SEQ ID NO: 69444 - RNA, 19 nt, Artificial Sequence
  Chemically synthesized
ugguccucugauauaaaag

SEQ ID NO: 69445 - RNA, 19 nt, Artificial Sequence
  Chemically synthesized
uggccgaggaauucuuucg

SEQ ID NO: 69446 - RNA, 19 nt, Artificial Sequence
  Chemically synthesized
uugcccuggcuauuggaau

SEQ ID NO: 69447 - RNA, 19 nt, Artificial Sequence
  Chemically synthesized
auucugggcagcagcaauu

SEQ ID NO: 69448 - RNA, 19 nt, Artificial Sequence
  Chemically synthesized
ugcuggaaguuuuuuccug

SEQ ID NO: 69449 - RNA, 19 nt, Artificial Sequence
  Chemically synthesized
ucuugcuuagaaccuggag

SEQ ID NO: 69450 - RNA, 19 nt, Artificial Sequence
  Chemically synthesized
uucaaacacucccucuguu

SEQ ID NO: 69451 - RNA, 19 nt, Artificial Sequence
  Chemically synthesized
auagaggcgaucaagcuca

SEQ ID NO: 69452 - RNA, 19 nt, Artificial Sequence
  Chemically synthesized
ucccauugcuuagucucuu

SEQ ID NO: 69453 - RNA, 19 nt, Artificial Sequence
  Chemically synthesized
uguuccuuaguugccagca

SEQ ID NO: 69454 - RNA, 19 nt, Artificial Sequence
  Chemically synthesized
ucuucacugacaauauaca

SEQ ID NO: 69455 - RNA, 19 nt, Artificial Sequence
  Chemically synthesized
ugcuacacgggacaccuuu

SEQ ID NO: 69456 - RNA, 19 nt, Artificial Sequence
  Chemically synthesized
ucccuccuuaucauuaagg

SEQ ID NO: 69457 - RNA, 19 nt, Artificial Sequence
  Chemically synthesized
ucccaaagcgcauaaauga

SEQ ID NO: 69458 - RNA, 19 nt, Artificial Sequence
  Chemically synthesized
ucuguacaaggucaaauuc

SEQ ID NO: 69459 - RNA, 19 nt, Artificial Sequence
  Chemically synthesized
uacgcaaguuuguccuuuu

SEQ ID NO: 69460 - RNA, 19 nt, Artificial Sequence
  Chemically synthesized
cuuuucgggcuccacaugu

SEQ ID NO: 69461 - RNA, 19 nt, Artificial Sequence
  Chemically synthesized
cugaacugaagaaacaggc

SEQ ID NO: 69462 - RNA, 19 nt, Artificial Sequence
  Chemically synthesized
uacacuugaaaaguguggc

SEQ ID NO: 69463 - RNA, 19 nt, Artificial Sequence
  Chemically synthesized
agcagguggacuuucuugc

SEQ ID NO: 69464 - RNA, 19 nt, Artificial Sequence
  Chemically synthesized
auugagaacggacgcacuu

SEQ ID NO: 69465 - RNA, 19 nt, Artificial Sequence
  Chemically synthesized
ugggaaaagaucugcauuu

SEQ ID NO: 69466 - RNA, 19 nt, Artificial Sequence
  Chemically synthesized
ugcauauuguuucuggagu

SEQ ID NO: 69467 - RNA, 19 nt, Artificial Sequence
  Chemically synthesized
ugauucucagcuauuucuu

SEQ ID NO: 69468 - RNA, 19 nt, Artificial Sequence
  Chemically synthesized
uaacaguucuucacugaca

SEQ ID NO: 69469 - RNA, 19 nt, Artificial Sequence
  Chemically synthesized
uguagaaaacaggauuguc

SEQ ID NO: 69470 - RNA, 19 nt, Artificial Sequence
  Chemically synthesized
uaucugagugcuacacggg

SEQ ID NO: 69471 - RNA, 19 nt, Artificial Sequence
  Chemically synthesized
uucauucucuucuagagac

SEQ ID NO: 69472 - RNA, 19 nt, Artificial Sequence
  Chemically synthesized
uuaaacuuggauccugaga

SEQ ID NO: 69473 - RNA, 19 nt, Artificial Sequence
  Chemically synthesized
auucuuggguacaguccca

SEQ ID NO: 69474 - RNA, 19 nt, Artificial Sequence
  Chemically synthesized
uaucauuaaggcgcgccca

SEQ ID NO: 69475 - RNA, 19 nt, Artificial Sequence
  Chemically synthesized
acuuggacguuguuacaug

SEQ ID NO: 69476 - RNA, 19 nt, Artificial Sequence
  Chemically synthesized
acuucguuccucugacuuc

SEQ ID NO: 69477 - RNA, 19 nt, Artificial Sequence
  Chemically synthesized
uacuccuccagguacacau

SEQ ID NO: 69478 - RNA, 19 nt, Artificial Sequence
  Chemically synthesized
ugguucuucuggguuauuc

SEQ ID NO: 69479 - RNA, 19 nt, Artificial Sequence
  Chemically synthesized
aaugauucaggaaccagag

SEQ ID NO: 69480 - RNA, 19 nt, Artificial Sequence
  Chemically synthesized
uucgggcuccacauguaaa

SEQ ID NO: 69481 - RNA, 19 nt, Artificial Sequence
  Chemically synthesized
ucuggauuucuacugggcu

SEQ ID NO: 69482 - RNA, 19 nt, Artificial Sequence
  Chemically synthesized
auuaggacccucuggcucu

SEQ ID NO: 69483 - RNA, 19 nt, Artificial Sequence
  Chemically synthesized
auacacuugaaaagugugg

SEQ ID NO: 69484 - RNA, 19 nt, Artificial Sequence
  Chemically synthesized
ccacacuucagccaaaugg

SEQ ID NO: 69485 - RNA, 19 nt, Artificial Sequence
  Chemically synthesized
uuccgucuggcuuaauguc

SEQ ID NO: 69486 - RNA, 19 nt, Artificial Sequence
  Chemically synthesized
ugguacuuuagccacauuu

SEQ ID NO: 69487 - RNA, 19 nt, Artificial Sequence
  Chemically synthesized
acgcacuuucuucucuuuc

SEQ ID NO: 69488 - RNA, 19 nt, Artificial Sequence
  Chemically synthesized
ugagguacagaagcagagc

SEQ ID NO: 69489 - RNA, 19 nt, Artificial Sequence
  Chemically synthesized
acuccaaucagggccaacu

SEQ ID NO: 69490 - RNA, 19 nt, Artificial Sequence
  Chemically synthesized
acuggauggauuuuagagc

SEQ ID NO: 69491 - RNA, 19 nt, Artificial Sequence
  Chemically synthesized
uccacguggccuuuaagug

SEQ ID NO: 69492 - RNA, 19 nt, Artificial Sequence
  Chemically synthesized
agcaaguuucuaauuucug

SEQ ID NO: 69493 - RNA, 19 nt, Artificial Sequence
  Chemically synthesized
cuaauuacugguaccguag

SEQ ID NO: 69494 - RNA, 19 nt, Artificial Sequence
  Chemically synthesized
cugauuucccaacugccca

SEQ ID NO: 69495 - RNA, 19 nt, Artificial Sequence
  Chemically synthesized
accaccauucgauuucauc

SEQ ID NO: 69496 - RNA, 19 nt, Artificial Sequence
  Chemically synthesized
ucuucccuguggaugauug

SEQ ID NO: 69497 - RNA, 19 nt, Artificial Sequence
  Chemically synthesized
acuuaucugcagcagucug

SEQ ID NO: 69498 - RNA, 19 nt, Artificial Sequence
  Chemically synthesized
uccaucacuaucagcagca

SEQ ID NO: 69499 - RNA, 19 nt, Artificial Sequence
  Chemically synthesized
aauuucacccucauuccau

SEQ ID NO: 69500 - RNA, 19 nt, Artificial Sequence
  Chemically synthesized
uacgcucugagccaguuuu

SEQ ID NO: 69501 - RNA, 19 nt, Artificial Sequence
  Chemically synthesized
auguggagccucuggauuu

SEQ ID NO: 69502 - RNA, 19 nt, Artificial Sequence
  Chemically synthesized
uguaaauauggauucugga

SEQ ID NO: 69503 - RNA, 19 nt, Artificial Sequence
  Chemically synthesized
auauuuggcccauuaggac

SEQ ID NO: 69504 - RNA, 19 nt, Artificial Sequence
  Chemically synthesized
uacguuucuuuagaggccu

SEQ ID NO: 69505 - RNA, 19 nt, Artificial Sequence
  Chemically synthesized
ugcguuagacaguuucuuu

SEQ ID NO: 69506 - RNA, 19 nt, Artificial Sequence
  Chemically synthesized
ucgguaaggauuagauaag

SEQ ID NO: 69507 - RNA, 19 nt, Artificial Sequence
  Chemically synthesized
uauccgcaacuggacguuc

SEQ ID NO: 69508 - RNA, 19 nt, Artificial Sequence
  Chemically synthesized
uuaguucccauggacggaa

SEQ ID NO: 69509 - RNA, 19 nt, Artificial Sequence
  Chemically synthesized
uccgucuggcuuaaugucu

SEQ ID NO: 69510 - RNA, 19 nt, Artificial Sequence
  Chemically synthesized
ucuggcuuaaugucugaag

SEQ ID NO: 69511 - RNA, 19 nt, Artificial Sequence
  Chemically synthesized
aagguggcugauuaguuug

SEQ ID NO: 69512 - RNA, 19 nt, Artificial Sequence
  Chemically synthesized
ccaaauggcaaucacucuc

SEQ ID NO: 69513 - RNA, 19 nt, Artificial Sequence
  Chemically synthesized
uguaggaacaggagguggu

SEQ ID NO: 69514 - RNA, 19 nt, Artificial Sequence
  Chemically synthesized
auuggacuggucuacugca

SEQ ID NO: 69515 - RNA, 19 nt, Artificial Sequence
  Chemically synthesized
aaaagaucugcauuugaag

SEQ ID NO: 69516 - RNA, 19 nt, Artificial Sequence
  Chemically synthesized
uuguuucuuagcugcagcu

SEQ ID NO: 69517 - RNA, 19 nt, Artificial Sequence
  Chemically synthesized
ucuuagcugcagcuccuua

SEQ ID NO: 69518 - RNA, 19 nt, Artificial Sequence
  Chemically synthesized
uuauagaggcgaucaagcu

SEQ ID NO: 69519 - RNA, 19 nt, Artificial Sequence
  Chemically synthesized
ucaauuuccuccacaaguu

SEQ ID NO: 69520 - RNA, 19 nt, Artificial Sequence
  Chemically synthesized
guugucgcugaucuuguug

SEQ ID NO: 69521 - RNA, 19 nt, Artificial Sequence
  Chemically synthesized
uucuccuuucuucgauauu

SEQ ID NO: 69522 - RNA, 19 nt, Artificial Sequence
  Chemically synthesized
uuuaggagcagcugcugaa

SEQ ID NO: 69523 - RNA, 19 nt, Artificial Sequence
  Chemically synthesized
uuucccaacugcccaauaa

SEQ ID NO: 69524 - RNA, 19 nt, Artificial Sequence
  Chemically synthesized
auugucgcuguauacuuau

SEQ ID NO: 69525 - RNA, 19 nt, Artificial Sequence
  Chemically synthesized
ucacgcuaaauguccucua

SEQ ID NO: 69526 - RNA, 19 nt, Artificial Sequence
  Chemically synthesized
uggaaguuucaggccaagc

SEQ ID NO: 69527 - RNA, 19 nt, Artificial Sequence
  Chemically synthesized
guuacguggaacauauccc

SEQ ID NO: 69528 - RNA, 19 nt, Artificial Sequence
  Chemically synthesized
uccuccauuuccucgcacu

SEQ ID NO: 69529 - RNA, 19 nt, Artificial Sequence
  Chemically synthesized
cuuaucugcagcagucugc

SEQ ID NO: 69530 - RNA, 19 nt, Artificial Sequence
  Chemically synthesized
uuaucugcagcagucugca

SEQ ID NO: 69531 - RNA, 19 nt, Artificial Sequence
  Chemically synthesized
ucuagcaguaaagcaaggg

SEQ ID NO: 69532 - RNA, 19 nt, Artificial Sequence
  Chemically synthesized
uccaugagcgauacgcucu

SEQ ID NO: 69533 - RNA, 19 nt, Artificial Sequence
  Chemically synthesized
cuggauuugguucuucugg

SEQ ID NO: 69534 - RNA, 19 nt, Artificial Sequence
  Chemically synthesized
ucuggcucuguaauagaac

SEQ ID NO: 69535 - RNA, 19 nt, Artificial Sequence
  Chemically synthesized
uuucaugguucuccugaac

SEQ ID NO: 69536 - RNA, 19 nt, Artificial Sequence
  Chemically synthesized
uggcuauuggaauaaaugu

SEQ ID NO: 69537 - RNA, 19 nt, Artificial Sequence
  Chemically synthesized
uucucugggugcugcuguu

SEQ ID NO: 69538 - RNA, 19 nt, Artificial Sequence
  Chemically synthesized
uacaggcuuaccauauaca

SEQ ID NO: 69539 - RNA, 19 nt, Artificial Sequence
  Chemically synthesized
ugcugagaacuuccgucug

SEQ ID NO: 69540 - RNA, 19 nt, Artificial Sequence
  Chemically synthesized
uuuugguuuuguaggaaca

SEQ ID NO: 69541 - RNA, 19 nt, Artificial Sequence
  Chemically synthesized
ucccgcaagauaucuucac

SEQ ID NO: 69542 - RNA, 19 nt, Artificial Sequence
  Chemically synthesized
caaacauugagaacggacg

SEQ ID NO: 69543 - RNA, 19 nt, Artificial Sequence
  Chemically synthesized
ugguagauuuucuuuuugc

SEQ ID NO: 69544 - RNA, 19 nt, Artificial Sequence
  Chemically synthesized
cuuuuugcuguagagcugc

SEQ ID NO: 69545 - RNA, 19 nt, Artificial Sequence
  Chemically synthesized
uuucuggaguaacuggaac

SEQ ID NO: 69546 - RNA, 19 nt, Artificial Sequence
  Chemically synthesized
uucuuagcugcagcuccuu

SEQ ID NO: 69547 - RNA, 19 nt, Artificial Sequence
  Chemically synthesized
cuuauagaggcgaucaagc

SEQ ID NO: 69548 - RNA, 19 nt, Artificial Sequence
  Chemically synthesized
cugcucagcaacuuguugc

SEQ ID NO: 69549 - RNA, 19 nt, Artificial Sequence
  Chemically synthesized
cuguugucgcugaucuugu

SEQ ID NO: 69550 - RNA, 19 nt, Artificial Sequence
  Chemically synthesized
uuaagcgcuguuccuuagu

SEQ ID NO: 69551 - RNA, 19 nt, Artificial Sequence
  Chemically synthesized
cugaaguucagcaagaguc

SEQ ID NO: 69552 - RNA, 19 nt, Artificial Sequence
  Chemically synthesized
cuauuaacaccguucuccu

SEQ ID NO: 69553 - RNA, 19 nt, Artificial Sequence
  Chemically synthesized
ucagccuacaaacaagauu

SEQ ID NO: 69554 - RNA, 19 nt, Artificial Sequence
  Chemically synthesized
acugacaaccaacuaacag

SEQ ID NO: 69555 - RNA, 19 nt, Artificial Sequence
  Chemically synthesized
ucuucgauauucaccagga

SEQ ID NO: 69556 - RNA, 19 nt, Artificial Sequence
  Chemically synthesized
ugacguagaugcuuuauuu

SEQ ID NO: 69557 - RNA, 19 nt, Artificial Sequence
  Chemically synthesized
auucuucaucgcuuucaag

SEQ ID NO: 69558 - RNA, 19 nt, Artificial Sequence
  Chemically synthesized
uuuaaacuuggauccugag

SEQ ID NO: 69559 - RNA, 19 nt, Artificial Sequence
  Chemically synthesized
caugcagucuccuucuuuc

SEQ ID NO: 69560 - RNA, 19 nt, Artificial Sequence
  Chemically synthesized
augcagucuccuucuuuca

SEQ ID NO: 69561 - RNA, 19 nt, Artificial Sequence
  Chemically synthesized
ucugcagcagucugcaugu

SEQ ID NO: 69562 - RNA, 19 nt, Artificial Sequence
  Chemically synthesized
ugaggcagcacaauguaau

SEQ ID NO: 69563 - RNA, 19 nt, Artificial Sequence
  Chemically synthesized
cuccaaagacgaaucuagc

SEQ ID NO: 69564 - RNA, 19 nt, Artificial Sequence
  Chemically synthesized
auggauucuggauuucuac

SEQ ID NO: 69565 - RNA, 19 nt, Artificial Sequence
  Chemically synthesized
cuggcuauuggaauaaaug

SEQ ID NO: 69566 - RNA, 19 nt, Artificial Sequence
  Chemically synthesized
auguucucugggugcugcu

SEQ ID NO: 69567 - RNA, 19 nt, Artificial Sequence
  Chemically synthesized
uugauucugggcagcagca

SEQ ID NO: 69568 - RNA, 19 nt, Artificial Sequence
  Chemically synthesized
ugggcagcagcaauuacag

SEQ ID NO: 69569 - RNA, 19 nt, Artificial Sequence
  Chemically synthesized
uuuuuuccuggcgccugcu

SEQ ID NO: 69570 - RNA, 19 nt, Artificial Sequence
  Chemically synthesized
ucugaagguggcugauuag

SEQ ID NO: 69571 - RNA, 19 nt, Artificial Sequence
  Chemically synthesized
ugagcaucccgcaagauau

SEQ ID NO: 69572 - RNA, 19 nt, Artificial Sequence
  Chemically synthesized
acugcucugguucuuccuc

SEQ ID NO: 69573 - RNA, 19 nt, Artificial Sequence
  Chemically synthesized
uccaccacgucucugcaua

SEQ ID NO: 69574 - RNA, 19 nt, Artificial Sequence
  Chemically synthesized
ugcuuugagguacagaagc

SEQ ID NO: 69575 - RNA, 19 nt, Artificial Sequence
  Chemically synthesized
uuagagccuuuaguuugug

SEQ ID NO: 69576 - RNA, 19 nt, Artificial Sequence
  Chemically synthesized
uguuucuggaguaacugga

SEQ ID NO: 69577 - RNA, 19 nt, Artificial Sequence
  Chemically synthesized
ucugaauuacgcuuauuca

SEQ ID NO: 69578 - RNA, 19 nt, Artificial Sequence
  Chemically synthesized
uggaguaacuggaacuucu

SEQ ID NO: 69579 - RNA, 19 nt, Artificial Sequence
  Chemically synthesized
uuagcugcagcuccuuaua

SEQ ID NO: 69580 - RNA, 19 nt, Artificial Sequence
  Chemically synthesized
aauuuccuccacaaguuuc

SEQ ID NO: 69581 - RNA, 19 nt, Artificial Sequence
  Chemically synthesized
gcuuagucucuucuguucc

SEQ ID NO: 69582 - RNA, 19 nt, Artificial Sequence
  Chemically synthesized
aaguuucuccugcucagca

SEQ ID NO: 69583 - RNA, 19 nt, Artificial Sequence
  Chemically synthesized
gucuugugaaauuuuugcc

SEQ ID NO: 69584 - RNA, 19 nt, Artificial Sequence
  Chemically synthesized
aguuacguggaacauaucc

SEQ ID NO: 69585 - RNA, 19 nt, Artificial Sequence
  Chemically synthesized
guucauaaucccaaagcgc

SEQ ID NO: 69586 - RNA, 19 nt, Artificial Sequence
  Chemically synthesized
ugucacuguaggucauggc

SEQ ID NO: 69587 - RNA, 19 nt, Artificial Sequence
  Chemically synthesized
ugaagagccgugaugccuu

SEQ ID NO: 69588 - RNA, 19 nt, Artificial Sequence
  Chemically synthesized
ugggucaucaaccucauaa

SEQ ID NO: 69589 - RNA, 19 nt, Artificial Sequence
  Chemically synthesized
agcugacuuggauggguau

SEQ ID NO: 69590 - RNA, 19 nt, Artificial Sequence
  Chemically synthesized
ucuguaauagaacuacguu

SEQ ID NO: 69591 - RNA, 19 nt, Artificial Sequence
  Chemically synthesized
cuuucguaaggcuucuagg

SEQ ID NO: 69592 - RNA, 19 nt, Artificial Sequence
  Chemically synthesized
uaggaacaggaggugguac

SEQ ID NO: 69593 - RNA, 19 nt, Artificial Sequence
  Chemically synthesized
ucuucacugcucugguucu

SEQ ID NO: 69594 - RNA, 19 nt, Artificial Sequence
  Chemically synthesized
ucuuccucagaguaccaaa

SEQ ID NO: 69595 - RNA, 19 nt, Artificial Sequence
  Chemically synthesized
uggacuggucuacugcauc

SEQ ID NO: 69596 - RNA, 19 nt, Artificial Sequence
  Chemically synthesized
ugaaugaccaaggaaccau

SEQ ID NO: 69597 - RNA, 19 nt, Artificial Sequence
  Chemically synthesized
ugccuucuucuuccacagc

SEQ ID NO: 69598 - RNA, 19 nt, Artificial Sequence
  Chemically synthesized
acucccucuguuguuguag

SEQ ID NO: 69599 - RNA, 19 nt, Artificial Sequence
  Chemically synthesized
agccacugcagacugauug

SEQ ID NO: 69600 - RNA, 19 nt, Artificial Sequence
  Chemically synthesized
ucuugagcaucucuagcug

SEQ ID NO: 69601 - RNA, 19 nt, Artificial Sequence
  Chemically synthesized
ugaagugcugcucauuguu

SEQ ID NO: 69602 - RNA, 19 nt, Artificial Sequence
  Chemically synthesized
uucuccugcucagcaacuu

SEQ ID NO: 69603 - RNA, 19 nt, Artificial Sequence
  Chemically synthesized
acuuuaagcgcuguuccuu

SEQ ID NO: 69604 - RNA, 19 nt, Artificial Sequence
  Chemically synthesized
cuuuaagcgcuguuccuua

SEQ ID NO: 69605 - RNA, 19 nt, Artificial Sequence
  Chemically synthesized
ucagcuaugaucuugacaa

SEQ ID NO: 69606 - RNA, 19 nt, Artificial Sequence
  Chemically synthesized
ucugagauacaaaagacaa

SEQ ID NO: 69607 - RNA, 19 nt, Artificial Sequence
  Chemically synthesized
cuuaagaugcuacaaaaac

SEQ ID NO: 69608 - RNA, 19 nt, Artificial Sequence
  Chemically synthesized
uccuuucuucgauauucac

SEQ ID NO: 69609 - RNA, 19 nt, Artificial Sequence
  Chemically synthesized
uucccaacugcccaauaaa

SEQ ID NO: 69610 - RNA, 19 nt, Artificial Sequence
  Chemically synthesized
cuuaucugagugcuacacg

SEQ ID NO: 69611 - RNA, 19 nt, Artificial Sequence
  Chemically synthesized
uucuagagacauucuucau

SEQ ID NO: 69612 - RNA, 19 nt, Artificial Sequence
  Chemically synthesized
ucugagguucauaauccca

SEQ ID NO: 69613 - RNA, 19 nt, Artificial Sequence
  Chemically synthesized
ucuucuccugaacuccaua

SEQ ID NO: 69614 - RNA, 19 nt, Artificial Sequence
  Chemically synthesized
uaccaggaacuuaacgauu

SEQ ID NO: 69615 - RNA, 19 nt, Artificial Sequence
  Chemically synthesized
uacacaucaagcacaugug

SEQ ID NO: 69616 - RNA, 19 nt, Artificial Sequence
  Chemically synthesized
uggauuucuacugggcuuu

SEQ ID NO: 69617 - RNA, 19 nt, Artificial Sequence
  Chemically synthesized
uucuuucguaaggcuucua

SEQ ID NO: 69618 - RNA, 19 nt, Artificial Sequence
  Chemically synthesized
ucguuuucaugguucuccu

SEQ ID NO: 69619 - RNA, 19 nt, Artificial Sequence
  Chemically synthesized
uucugggcagcagcaauua

SEQ ID NO: 69620 - RNA, 19 nt, Artificial Sequence
  Chemically synthesized
auuauccgcaacuggacgu

SEQ ID NO: 69621 - RNA, 19 nt, Artificial Sequence
  Chemically synthesized
uggaaguaaggugucuuug

SEQ ID NO: 69622 - RNA, 19 nt, Artificial Sequence
  Chemically synthesized
agaaccuggagaaaggguc

SEQ ID NO: 69623 - RNA, 19 nt, Artificial Sequence
  Chemically synthesized
aaacaucggcaucaucuug

SEQ ID NO: 69624 - RNA, 19 nt, Artificial Sequence
  Chemically synthesized
ucccauggacggaacaacu

SEQ ID NO: 69625 - RNA, 19 nt, Artificial Sequence
  Chemically synthesized
acaacuguugacaacugcu

SEQ ID NO: 69626 - RNA, 19 nt, Artificial Sequence
  Chemically synthesized
uucagccaaauggcaauca

SEQ ID NO: 69627 - RNA, 19 nt, Artificial Sequence
  Chemically synthesized
cuuuaguuugugaagcagc

SEQ ID NO: 69628 - RNA, 19 nt, Artificial Sequence
  Chemically synthesized
augacugccacuucugaau

SEQ ID NO: 69629 - RNA, 19 nt, Artificial Sequence
  Chemically synthesized
uguuguuguagcuuggcau

SEQ ID NO: 69630 - RNA, 19 nt, Artificial Sequence
  Chemically synthesized
cuuggcauucugcucuuga

SEQ ID NO: 69631 - RNA, 19 nt, Artificial Sequence
  Chemically synthesized
ugccuggucaguucuucua

SEQ ID NO: 69632 - RNA, 19 nt, Artificial Sequence
  Chemically synthesized
uggucaguucuucuacuuu

SEQ ID NO: 69633 - RNA, 19 nt, Artificial Sequence
  Chemically synthesized
guugcugggcuucaaucug

SEQ ID NO: 69634 - RNA, 19 nt, Artificial Sequence
  Chemically synthesized
cuucaaucuguugcugcug

SEQ ID NO: 69635 - RNA, 19 nt, Artificial Sequence
  Chemically synthesized
cagccuacaaacaagauuc

SEQ ID NO: 69636 - RNA, 19 nt, Artificial Sequence
  Chemically synthesized
acaaucagagacagcgaug

SEQ ID NO: 69637 - RNA, 19 nt, Artificial Sequence
  Chemically synthesized
auacuuaucugagugcuac

SEQ ID NO: 69638 - RNA, 19 nt, Artificial Sequence
  Chemically synthesized
cuuuauuucaucacgcuaa

SEQ ID NO: 69639 - RNA, 19 nt, Artificial Sequence
  Chemically synthesized
ucaucacgcuaaauguccu

SEQ ID NO: 69640 - RNA, 19 nt, Artificial Sequence
  Chemically synthesized
gguuuaauucuuggguaca

SEQ ID NO: 69641 - RNA, 19 nt, Artificial Sequence
  Chemically synthesized
uucuccugaacuccauaaa

SEQ ID NO: 69642 - RNA, 19 nt, Artificial Sequence
  Chemically synthesized
aacuguaccaggaacuuaa

SEQ ID NO: 69643 - RNA, 19 nt, Artificial Sequence
  Chemically synthesized
uccucugauauaaaagcuu

SEQ ID NO: 69644 - RNA, 19 nt, Artificial Sequence
  Chemically synthesized
guuucuuucguaaggcuuc

SEQ ID NO: 69645 - RNA, 19 nt, Artificial Sequence
  Chemically synthesized
aauuuaguugggcugagug

SEQ ID NO: 69646 - RNA, 19 nt, Artificial Sequence
  Chemically synthesized
ucaugguucuccugaacug

SEQ ID NO: 69647 - RNA, 19 nt, Artificial Sequence
  Chemically synthesized
ucugggcagcagcaauuac

SEQ ID NO: 69648 - RNA, 19 nt, Artificial Sequence
  Chemically synthesized
uuagaaccuggagaaaggg

SEQ ID NO: 69649 - RNA, 19 nt, Artificial Sequence
  Chemically synthesized
guuuaguucccauggacgg

SEQ ID NO: 69650 - RNA, 19 nt, Artificial Sequence
  Chemically synthesized
auggacggaacaacuguug

SEQ ID NO: 69651 - RNA, 19 nt, Artificial Sequence
  Chemically synthesized
uggcugauuaguuugucca

SEQ ID NO: 69652 - RNA, 19 nt, Artificial Sequence
  Chemically synthesized
uuuguaggaacaggaggug

SEQ ID NO: 69653 - RNA, 19 nt, Artificial Sequence
  Chemically synthesized
uauuugcaaccugagcauc

SEQ ID NO: 69654 - RNA, 19 nt, Artificial Sequence
  Chemically synthesized
uugucucuucgacgcucgu

SEQ ID NO: 69655 - RNA, 21 nt, Artificial Sequence
  Chemically synthesized
cgaugaagaaugucucuagaa

SEQ ID NO: 69656 - RNA, 21 nt, Artificial Sequence
  Chemically synthesized
cuuacuuccacccuucagaaa

SEQ ID NO: 69657 - RNA, 21 nt, Artificial Sequence
  Chemically synthesized
gaauuaaaccaagacaaagga

SEQ ID NO: 69658 - RNA, 21 nt, Artificial Sequence
  Chemically synthesized
uacccaagaauuaaaccaaga

SEQ ID NO: 69659 - RNA, 21 nt, Artificial Sequence
  Chemically synthesized
gggacuguacccaagaauuaa

SEQ ID NO: 69660 - RNA, 21 nt, Artificial Sequence
  Chemically synthesized
gaugaugagcugcccaugaaa

SEQ ID NO: 69661 - RNA, 21 nt, Artificial Sequence
  Chemically synthesized
cguugaccaagacucauacca

SEQ ID NO: 69662 - RNA, 21 nt, Artificial Sequence
  Chemically synthesized
gaauaacccagaagaaccaaa

SEQ ID NO: 69663 - RNA, 21 nt, Artificial Sequence
  Chemically synthesized
aggagaaccaugaaaacgaaa

SEQ ID NO: 69664 - RNA, 21 nt, Artificial Sequence
  Chemically synthesized
gaaucaagagcagaaugccaa

SEQ ID NO: 69665 - RNA, 21 nt, Artificial Sequence
  Chemically synthesized
caggcagcuagagaugcucaa

SEQ ID NO: 69666 - RNA, 21 nt, Artificial Sequence
  Chemically synthesized
gcaccaaggccucuaaagaaa

SEQ ID NO: 69667 - RNA, 21 nt, Artificial Sequence
  Chemically synthesized
uuacuuccacccuucagaaaa

SEQ ID NO: 69668 - RNA, 21 nt, Artificial Sequence
  Chemically synthesized
gccugaaacuuccacacagaa

SEQ ID NO: 69669 - RNA, 21 nt, Artificial Sequence
  Chemically synthesized
gaugcucagguugcaaauaaa

SEQ ID NO: 69670 - RNA, 21 nt, Artificial Sequence
  Chemically synthesized
ggaugcucagguugcaaauaa

SEQ ID NO: 69671 - RNA, 21 nt, Artificial Sequence
  Chemically synthesized
ggagggauauguuccacguaa

SEQ ID NO: 69672 - RNA, 21 nt, Artificial Sequence
  Chemically synthesized
cauggauaagcguguuaauga

SEQ ID NO: 69673 - RNA, 21 nt, Artificial Sequence
  Chemically synthesized
caucauacccauccaagucag

SEQ ID NO: 69674 - RNA, 21 nt, Artificial Sequence
  Chemically synthesized
gcagaucuuuucccaagccaa

SEQ ID NO: 69675 - RNA, 21 nt, Artificial Sequence
  Chemically synthesized
gaaucaacagcagcacccaga

SEQ ID NO: 69676 - RNA, 21 nt, Artificial Sequence
  Chemically synthesized
aagagaaugaaggauugaaga

SEQ ID NO: 69677 - RNA, 21 nt, Artificial Sequence
  Chemically synthesized
cuguacccaagaauuaaacca

SEQ ID NO: 69678 - RNA, 21 nt, Artificial Sequence
  Chemically synthesized
caugcagacugcugcagauaa

SEQ ID NO: 69679 - RNA, 21 nt, Artificial Sequence
  Chemically synthesized
agaugaugccgauguuucuua

SEQ ID NO: 69680 - RNA, 21 nt, Artificial Sequence
  Chemically synthesized
gaaggcagcucuacagcaaaa

SEQ ID NO: 69681 - RNA, 21 nt, Artificial Sequence
  Chemically synthesized
uaaggagcugcagcuaagaaa

SEQ ID NO: 69682 - RNA, 21 nt, Artificial Sequence
  Chemically synthesized
gcugggacuguacccaagaau

SEQ ID NO: 69683 - RNA, 21 nt, Artificial Sequence
  Chemically synthesized
ccugguacaguuugguguaaa

SEQ ID NO: 69684 - RNA, 21 nt, Artificial Sequence
  Chemically synthesized
cauuuauugggcaguugggaa

SEQ ID NO: 69685 - RNA, 21 nt, Artificial Sequence
  Chemically synthesized
acaagaauccugucuaguaaa

SEQ ID NO: 69686 - RNA, 21 nt, Artificial Sequence
  Chemically synthesized
gaaggauugaagaauucacca

SEQ ID NO: 69687 - RNA, 21 nt, Artificial Sequence
  Chemically synthesized
cauacccauccaagucagcuu

SEQ ID NO: 69688 - RNA, 21 nt, Artificial Sequence
  Chemically synthesized
guuccguccaugggaacuaaa

SEQ ID NO: 69689 - RNA, 21 nt, Artificial Sequence
  Chemically synthesized
ccaccuccuguuccuacaaaa

SEQ ID NO: 69690 - RNA, 21 nt, Artificial Sequence
  Chemically synthesized
gaagaagaaggcagcucuaca

SEQ ID NO: 69691 - RNA, 21 nt, Artificial Sequence
  Chemically synthesized
ccuguuccuacaaaaccaaaa

SEQ ID NO: 69692 - RNA, 21 nt, Artificial Sequence
  Chemically synthesized
cagcucuacagcaaaaagaaa

SEQ ID NO: 69693 - RNA, 21 nt, Artificial Sequence
  Chemically synthesized
gaucgacagccaccaugacaa

SEQ ID NO: 69694 - RNA, 21 nt, Artificial Sequence
  Chemically synthesized
caacuaaggaacagcgcuuaa

SEQ ID NO: 69695 - RNA, 21 nt, Artificial Sequence
  Chemically synthesized
caggauccaaguuuaaaaaga

SEQ ID NO: 69696 - RNA, 21 nt, Artificial Sequence
  Chemically synthesized
gaucucaggauccaaguuuaa

SEQ ID NO: 69697 - RNA, 21 nt, Artificial Sequence
  Chemically synthesized
ugaugaugagcugcccaugaa

SEQ ID NO: 69698 - RNA, 21 nt, Artificial Sequence
  Chemically synthesized
aggagaagaugggcauaauga

SEQ ID NO: 69699 - RNA, 21 nt, Artificial Sequence
  Chemically synthesized
cauccaagucagcuucuguga

SEQ ID NO: 69700 - RNA, 21 nt, Artificial Sequence
  Chemically synthesized
gaugcugaccuagaagccuua

SEQ ID NO: 69701 - RNA, 21 nt, Artificial Sequence
  Chemically synthesized
cccugauuggaguccuucaaa

SEQ ID NO: 69702 - RNA, 21 nt, Artificial Sequence
  Chemically synthesized
aagagacuaagcaaugggaaa

SEQ ID NO: 69703 - RNA, 21 nt, Artificial Sequence
  Chemically synthesized
caaugagcagcacuucacaga

SEQ ID NO: 69704 - RNA, 21 nt, Artificial Sequence
  Chemically synthesized
gcugcagauaagugcgaggaa

SEQ ID NO: 69705 - RNA, 21 nt, Artificial Sequence
  Chemically synthesized
gaaaauacagacacugcccaa

SEQ ID NO: 69706 - RNA, 21 nt, Artificial Sequence
  Chemically synthesized
caagaucagcgacaacagcaa

SEQ ID NO: 69707 - RNA, 21 nt, Artificial Sequence
  Chemically synthesized
gaaacaacaagaucagcgaca

SEQ ID NO: 69708 - RNA, 21 nt, Artificial Sequence
  Chemically synthesized
ugaugagcugcccaugaaaga

SEQ ID NO: 69709 - RNA, 21 nt, Artificial Sequence
  Chemically synthesized
agaccguggcagcaaguucaa

SEQ ID NO: 69710 - RNA, 21 nt, Artificial Sequence
  Chemically synthesized
guccaugggaacuaaaccaaa

SEQ ID NO: 69711 - RNA, 21 nt, Artificial Sequence
  Chemically synthesized
gcagcuagagaugcucaagaa

SEQ ID NO: 69712 - RNA, 21 nt, Artificial Sequence
  Chemically synthesized
guugguugucagugaacaaua

SEQ ID NO: 69713 - RNA, 21 nt, Artificial Sequence
  Chemically synthesized
agagcagaaugccaagcuaca

SEQ ID NO: 69714 - RNA, 21 nt, Artificial Sequence
  Chemically synthesized
gaaauagcugagaaucaggaa

SEQ ID NO: 69715 - RNA, 21 nt, Artificial Sequence
  Chemically synthesized
cagacauuaagccagacggaa

SEQ ID NO: 69716 - RNA, 21 nt, Artificial Sequence
  Chemically synthesized
ggaucaaguugaugauggaga

SEQ ID NO: 69717 - RNA, 21 nt, Artificial Sequence
  Chemically synthesized
cguguagcacucagauaagua

SEQ ID NO: 69718 - RNA, 21 nt, Artificial Sequence
  Chemically synthesized
ggaagacgaagaugaaaucga

SEQ ID NO: 69719 - RNA, 21 nt, Artificial Sequence
  Chemically synthesized
gaccaagaucucaggauccaa

SEQ ID NO: 69720 - RNA, 21 nt, Artificial Sequence
  Chemically synthesized
cccagaagaaccaaauccaga

SEQ ID NO: 69721 - RNA, 21 nt, Artificial Sequence
  Chemically synthesized
aguagaaauccagaauccaua

SEQ ID NO: 69722 - RNA, 21 nt, Artificial Sequence
  Chemically synthesized
ccagagaacauuuauuccaau

SEQ ID NO: 69723 - RNA, 21 nt, Artificial Sequence
  Chemically synthesized
cguccaugggaacuaaaccaa

SEQ ID NO: 69724 - RNA, 21 nt, Artificial Sequence
  Chemically synthesized
cacgagcgucgaagagacaaa

SEQ ID NO: 69725 - RNA, 21 nt, Artificial Sequence
  Chemically synthesized
gaaugcucuggaucaaguuga

SEQ ID NO: 69726 - RNA, 21 nt, Artificial Sequence
  Chemically synthesized
caagcuacaacaacagaggga

SEQ ID NO: 69727 - RNA, 21 nt, Artificial Sequence
  Chemically synthesized
gagcugcagcuaagaaacaaa

SEQ ID NO: 69728 - RNA, 21 nt, Artificial Sequence
  Chemically synthesized
agcugagaaucaggaagcuaa

SEQ ID NO: 69729 - RNA, 21 nt, Artificial Sequence
  Chemically synthesized
caagaauccugucuaguaaau

SEQ ID NO: 69730 - RNA, 21 nt, Artificial Sequence
  Chemically synthesized
caguccagaaccugaaacaga

SEQ ID NO: 69731 - RNA, 21 nt, Artificial Sequence
  Chemically synthesized
uguaauugcugcugcccagaa

SEQ ID NO: 69732 - RNA, 21 nt, Artificial Sequence
  Chemically synthesized
acagcaggcgccaggaaaaaa

SEQ ID NO: 69733 - RNA, 21 nt, Artificial Sequence
  Chemically synthesized
ugagcuugaucgccucuauaa

SEQ ID NO: 69734 - RNA, 21 nt, Artificial Sequence
  Chemically synthesized
gauggaucugacucuugcuga

SEQ ID NO: 69735 - RNA, 21 nt, Artificial Sequence
  Chemically synthesized
caagaucauagcugacuuuaa

SEQ ID NO: 69736 - RNA, 21 nt, Artificial Sequence
  Chemically synthesized
agauaagugcgaggaaaugga

SEQ ID NO: 69737 - RNA, 21 nt, Artificial Sequence
  Chemically synthesized
ucccaucauacccauccaagu

SEQ ID NO: 69738 - RNA, 21 nt, Artificial Sequence
  Chemically synthesized
gggccacacuuuucaagugua

SEQ ID NO: 69739 - RNA, 21 nt, Artificial Sequence
  Chemically synthesized
cuuucuccagguucuaagcaa

SEQ ID NO: 69740 - RNA, 21 nt, Artificial Sequence
  Chemically synthesized
agaaagugcguccguucucaa

SEQ ID NO: 69741 - RNA, 21 nt, Artificial Sequence
  Chemically synthesized
cgcugagggagaaagagaaga

SEQ ID NO: 69742 - RNA, 21 nt, Artificial Sequence
  Chemically synthesized
ggcucugcuucuguaccucaa

SEQ ID NO: 69743 - RNA, 21 nt, Artificial Sequence
  Chemically synthesized
agcucuacagcaaaaagaaaa

SEQ ID NO: 69744 - RNA, 21 nt, Artificial Sequence
  Chemically synthesized
ggcagcucuacagcaaaaaga

SEQ ID NO: 69745 - RNA, 21 nt, Artificial Sequence
  Chemically synthesized
caaugggaaacuuguggagga

SEQ ID NO: 69746 - RNA, 21 nt, Artificial Sequence
  Chemically synthesized
caacaauugcuggcaacuaag

SEQ ID NO: 69747 - RNA, 21 nt, Artificial Sequence
  Chemically synthesized
gcaacaauugcuggcaacuaa

SEQ ID NO: 69748 - RNA, 21 nt, Artificial Sequence
  Chemically synthesized
cgcuguguuugccaugaccua

SEQ ID NO: 69749 - RNA, 21 nt, Artificial Sequence
  Chemically synthesized
aauuugaccuuguacagagaa

SEQ ID NO: 69750 - RNA, 21 nt, Artificial Sequence
  Chemically synthesized
gucuuuggagggagaauuuga

SEQ ID NO: 69751 - RNA, 21 nt, Artificial Sequence
  Chemically synthesized
cagagcguaucgcucauggaa

SEQ ID NO: 69752 - RNA, 21 nt, Artificial Sequence
  Chemically synthesized
ggaagucagaggaacgaaguu

SEQ ID NO: 69753 - RNA, 21 nt, Artificial Sequence
  Chemically synthesized
uacccauccaagucagcuucu

SEQ ID NO: 69754 - RNA, 21 nt, Artificial Sequence
  Chemically synthesized
caggagaaccaugaaaacgaa

SEQ ID NO: 69755 - RNA, 21 nt, Artificial Sequence
  Chemically synthesized
cccagagaacauuuauuccaa

SEQ ID NO: 69756 - RNA, 21 nt, Artificial Sequence
  Chemically synthesized
ucaacagcagcacccagagaa

SEQ ID NO: 69757 - RNA, 21 nt, Artificial Sequence
  Chemically synthesized
gagugauugccauuuggcuga

SEQ ID NO: 69758 - RNA, 21 nt, Artificial Sequence
  Chemically synthesized
ugcucagguugcaaauaaaaa

SEQ ID NO: 69759 - RNA, 21 nt, Artificial Sequence
  Chemically synthesized
gcacuuaaaggccacguggaa

SEQ ID NO: 69760 - RNA, 21 nt, Artificial Sequence
  Chemically synthesized
gcuugauguguaccuggagga

SEQ ID NO: 69761 - RNA, 21 nt, Artificial Sequence
  Chemically synthesized
cugugacugccagcucagaaa

SEQ ID NO: 69762 - RNA, 21 nt, Artificial Sequence
  Chemically synthesized
ugaccuagaagccuuacgaaa

SEQ ID NO: 69763 - RNA, 21 nt, Artificial Sequence
  Chemically synthesized
ccagagugaugcugaccuaga

SEQ ID NO: 69764 - RNA, 21 nt, Artificial Sequence
  Chemically synthesized
ucacgagcgucgaagagacaa

SEQ ID NO: 69765 - RNA, 21 nt, Artificial Sequence
  Chemically synthesized
cgugguggaucugugcaaaga

SEQ ID NO: 69766 - RNA, 21 nt, Artificial Sequence
  Chemically synthesized
gauuggaguccuucaaaugca

SEQ ID NO: 69767 - RNA, 21 nt, Artificial Sequence
  Chemically synthesized
gaaacuuguggaggaaauuga

SEQ ID NO: 69768 - RNA, 21 nt, Artificial Sequence
  Chemically synthesized
gcuacagacuuacccguaaua

SEQ ID NO: 69769 - RNA, 21 nt, Artificial Sequence
  Chemically synthesized
ggcaaaaauuucacaagacuu

SEQ ID NO: 69770 - RNA, 21 nt, Artificial Sequence
  Chemically synthesized
gugggcgcgccuuaaugauaa

SEQ ID NO: 69771 - RNA, 21 nt, Artificial Sequence
  Chemically synthesized
gaaugaugaugagcugcccau

SEQ ID NO: 69772 - RNA, 21 nt, Artificial Sequence
  Chemically synthesized
ggaugguuccuuggucauuca

SEQ ID NO: 69773 - RNA, 21 nt, Artificial Sequence
  Chemically synthesized
acagauugaagcccagcaaca

SEQ ID NO: 69774 - RNA, 21 nt, Artificial Sequence
  Chemically synthesized
cagcgacaauccuguuuucua

SEQ ID NO: 69775 - RNA, 21 nt, Artificial Sequence
  Chemically synthesized
agaaggagacugcaugacaau

SEQ ID NO: 69776 - RNA, 21 nt, Artificial Sequence
  Chemically synthesized
agugauggauggacuccauua

SEQ ID NO: 69777 - RNA, 21 nt, Artificial Sequence
  Chemically synthesized
cgaaagaaacugucuaacgca

SEQ ID NO: 69778 - RNA, 21 nt, Artificial Sequence
  Chemically synthesized
gccuguuucuucaguucagga

SEQ ID NO: 69779 - RNA, 21 nt, Artificial Sequence
  Chemically synthesized
cagccuuccaaagacaccuua

SEQ ID NO: 69780 - RNA, 21 nt, Artificial Sequence
  Chemically synthesized
gguucuaagcaagaaagucca

SEQ ID NO: 69781 - RNA, 21 nt, Artificial Sequence
  Chemically synthesized
cacugggaaugcucuggauca

SEQ ID NO: 69782 - RNA, 21 nt, Artificial Sequence
  Chemically synthesized
aacuaaaggcucuaaaaucca

SEQ ID NO: 69783 - RNA, 21 nt, Artificial Sequence
  Chemically synthesized
gaaguuccaguuacuccagaa

SEQ ID NO: 69784 - RNA, 21 nt, Artificial Sequence
  Chemically synthesized
cugagcuugaucgccucuaua

SEQ ID NO: 69785 - RNA, 21 nt, Artificial Sequence
  Chemically synthesized
ggcagcuagagaugcucaaga

SEQ ID NO: 69786 - RNA, 21 nt, Artificial Sequence
  Chemically synthesized
agaacugaccaggcagcuaga

SEQ ID NO: 69787 - RNA, 21 nt, Artificial Sequence
  Chemically synthesized
guaacaaugagcagcacuuca

SEQ ID NO: 69788 - RNA, 21 nt, Artificial Sequence
  Chemically synthesized
guagcuugaaagcgaugaaga

SEQ ID NO: 69789 - RNA, 21 nt, Artificial Sequence
  Chemically synthesized
agaauuaaaccaagacaaagg

SEQ ID NO: 69790 - RNA, 21 nt, Artificial Sequence
  Chemically synthesized
ugggacuguacccaagaauua

SEQ ID NO: 69791 - RNA, 21 nt, Artificial Sequence
  Chemically synthesized
aggaaauggaggaaggcuaca

SEQ ID NO: 69792 - RNA, 21 nt, Artificial Sequence
  Chemically synthesized
agaggcuccacaugugcuuga

SEQ ID NO: 69793 - RNA, 21 nt, Artificial Sequence
  Chemically synthesized
agcucagaaagcccaguagaa

SEQ ID NO: 69794 - RNA, 21 nt, Artificial Sequence
  Chemically synthesized
cgcaccaaggccucuaaagaa

SEQ ID NO: 69795 - RNA, 21 nt, Artificial Sequence
  Chemically synthesized
acagcagcacccagagaacau

SEQ ID NO: 69796 - RNA, 21 nt, Artificial Sequence
  Chemically synthesized
accuuacuuccacccuucaga

SEQ ID NO: 69797 - RNA, 21 nt, Artificial Sequence
  Chemically synthesized
cuuugguacucugaggaagaa

SEQ ID NO: 69798 - RNA, 21 nt, Artificial Sequence
  Chemically synthesized
ggcugcaguaggucccuauau

SEQ ID NO: 69799 - RNA, 21 nt, Artificial Sequence
  Chemically synthesized
accaguuucaucugauggaaa

SEQ ID NO: 69800 - RNA, 21 nt, Artificial Sequence
  Chemically synthesized
acuuguggaggaaauugaaca

SEQ ID NO: 69801 - RNA, 21 nt, Artificial Sequence
  Chemically synthesized
gcaacaaguugcugagcagga

SEQ ID NO: 69802 - RNA, 21 nt, Artificial Sequence
  Chemically synthesized
gacucuugcugaacuucagga

SEQ ID NO: 69803 - RNA, 21 nt, Artificial Sequence
  Chemically synthesized
uggugaauaucgaagaaagga

SEQ ID NO: 69804 - RNA, 21 nt, Artificial Sequence
  Chemically synthesized
aaguuccuggugaauaucgaa

SEQ ID NO: 69805 - RNA, 21 nt, Artificial Sequence
  Chemically synthesized
ucuuuauggaguucaggagaa

SEQ ID NO: 69806 - RNA, 21 nt, Artificial Sequence
  Chemically synthesized
uaacaacguccaaguguguaa

SEQ ID NO: 69807 - RNA, 21 nt, Artificial Sequence
  Chemically synthesized
uaaugggccaaauauucagaa

SEQ ID NO: 69808 - RNA, 21 nt, Artificial Sequence
  Chemically synthesized
agaggguccuaaugggccaaa

SEQ ID NO: 69809 - RNA, 21 nt, Artificial Sequence
  Chemically synthesized
cuggcaguccagaaccugaaa

SEQ ID NO: 69810 - RNA, 21 nt, Artificial Sequence
  Chemically synthesized
gacccuuucuccagguucuaa

SEQ ID NO: 69811 - RNA, 21 nt, Artificial Sequence
  Chemically synthesized
uccuguuccuacaaaaccaaa

SEQ ID NO: 69812 - RNA, 21 nt, Artificial Sequence
  Chemically synthesized
ucaagaacggcaggaucgaca

SEQ ID NO: 69813 - RNA, 21 nt, Artificial Sequence
  Chemically synthesized
augggaaacuuguggaggaaa

SEQ ID NO: 69814 - RNA, 21 nt, Artificial Sequence
  Chemically synthesized
uaaaggccacguggaacagaa

SEQ ID NO: 69815 - RNA, 21 nt, Artificial Sequence
  Chemically synthesized
cgacaauccuguuuucuacaa

SEQ ID NO: 69816 - RNA, 21 nt, Artificial Sequence
  Chemically synthesized
gaagaaugucucuagaagaga

SEQ ID NO: 69817 - RNA, 21 nt, Artificial Sequence
  Chemically synthesized
caugaaagaaggagacugcau

SEQ ID NO: 69818 - RNA, 21 nt, Artificial Sequence
  Chemically synthesized
gcucauggaaugagggugaaa

SEQ ID NO: 69819 - RNA, 21 nt, Artificial Sequence
  Chemically synthesized
aguucaggagaaccaugaaaa

SEQ ID NO: 69820 - RNA, 21 nt, Artificial Sequence
  Chemically synthesized
cuuggucauucaggcuucaga

SEQ ID NO: 69821 - RNA, 21 nt, Artificial Sequence
  Chemically synthesized
gaugguuccuuggucauucag

SEQ ID NO: 69822 - RNA, 21 nt, Artificial Sequence
  Chemically synthesized
caauguagcuugaaagcgaug

SEQ ID NO: 69823 - RNA, 21 nt, Artificial Sequence
  Chemically synthesized
gagcuuggccugaaacuucca

SEQ ID NO: 69824 - RNA, 21 nt, Artificial Sequence
  Chemically synthesized
ccuuaaugauaaggagggaua

SEQ ID NO: 69825 - RNA, 21 nt, Artificial Sequence
  Chemically synthesized
aaucguuaaguuccugguaca

SEQ ID NO: 69826 - RNA, 21 nt, Artificial Sequence
  Chemically synthesized
cuuaucuaauccuuaccgaaa

SEQ ID NO: 69827 - RNA, 21 nt, Artificial Sequence
  Chemically synthesized
ggcaguccagaaccugaaaca

SEQ ID NO: 69828 - RNA, 21 nt, Artificial Sequence
  Chemically synthesized
gaacguccaguugcggauaau

SEQ ID NO: 69829 - RNA, 21 nt, Artificial Sequence
  Chemically synthesized
cuuccacccuucagaaaaccc

SEQ ID NO: 69830 - RNA, 21 nt, Artificial Sequence
  Chemically synthesized
gaagaaggcagcucuacagca

SEQ ID NO: 69831 - RNA, 21 nt, Artificial Sequence
  Chemically synthesized
gaaugccaagcuacaacaaca

SEQ ID NO: 69832 - RNA, 21 nt, Artificial Sequence
  Chemically synthesized
cagaaugccaagcuacaacaa

SEQ ID NO: 69833 - RNA, 21 nt, Artificial Sequence
  Chemically synthesized
gcagaaugccaagcuacaaca

SEQ ID NO: 69834 - RNA, 21 nt, Artificial Sequence
  Chemically synthesized
auaaggagcugcagcuaagaa

SEQ ID NO: 69835 - RNA, 21 nt, Artificial Sequence
  Chemically synthesized
ucuauaaggagcugcagcuaa

SEQ ID NO: 69836 - RNA, 21 nt, Artificial Sequence
  Chemically synthesized
caaucagucugcaguggcuga

SEQ ID NO: 69837 - RNA, 21 nt, Artificial Sequence
  Chemically synthesized
auuuguuccagcaaaaacaga

SEQ ID NO: 69838 - RNA, 21 nt, Artificial Sequence
  Chemically synthesized
gguugucagugaacaauaacu

SEQ ID NO: 69839 - RNA, 21 nt, Artificial Sequence
  Chemically synthesized
uagcuugaaagcgaugaagaa

SEQ ID NO: 69840 - RNA, 21 nt, Artificial Sequence
  Chemically synthesized
ccaugaaagaaggagacugca

SEQ ID NO: 69841 - RNA, 21 nt, Artificial Sequence
  Chemically synthesized
gggacauugugaguggaccaa

SEQ ID NO: 69842 - RNA, 21 nt, Artificial Sequence
  Chemically synthesized
ugcagauaagugcgaggaaau

SEQ ID NO: 69843 - RNA, 21 nt, Artificial Sequence
  Chemically synthesized
ugaccuacagugacaugcaga

SEQ ID NO: 69844 - RNA, 21 nt, Artificial Sequence
  Chemically synthesized
gguacaguuugguguaaaugu

SEQ ID NO: 69845 - RNA, 21 nt, Artificial Sequence
  Chemically synthesized
gguccuaaugggccaaauauu

SEQ ID NO: 69846 - RNA, 21 nt, Artificial Sequence
  Chemically synthesized
ggguccuaaugggccaaauau

SEQ ID NO: 69847 - RNA, 21 nt, Artificial Sequence
  Chemically synthesized
cguaguucuauuacagagcca

SEQ ID NO: 69848 - RNA, 21 nt, Artificial Sequence
  Chemically synthesized
caguucaggagaaccaugaaa

SEQ ID NO: 69849 - RNA, 21 nt, Artificial Sequence
  Chemically synthesized
cguccaguugcggauaaugag

SEQ ID NO: 69850 - RNA, 21 nt, Artificial Sequence
  Chemically synthesized
uugaccaagacucauaccaga

SEQ ID NO: 69851 - RNA, 21 nt, Artificial Sequence
  Chemically synthesized
gagggagaaagagaagaaagu

SEQ ID NO: 69852 - RNA, 21 nt, Artificial Sequence
  Chemically synthesized
aggagcugcagcuaagaaaca

SEQ ID NO: 69853 - RNA, 21 nt, Artificial Sequence
  Chemically synthesized
acuuaaaggccacguggaaca

SEQ ID NO: 69854 - RNA, 21 nt, Artificial Sequence
  Chemically synthesized
auuuauugggcaguugggaaa

SEQ ID NO: 69855 - RNA, 21 nt, Artificial Sequence
  Chemically synthesized
ccugaaacuuccacacagaau

SEQ ID NO: 69856 - RNA, 21 nt, Artificial Sequence
  Chemically synthesized
aggagggauauguuccacgua

SEQ ID NO: 69857 - RNA, 21 nt, Artificial Sequence
  Chemically synthesized
aagacgaagaugaaaucgaau

SEQ ID NO: 69858 - RNA, 21 nt, Artificial Sequence
  Chemically synthesized
gacauugugaguggaccaaga

SEQ ID NO: 69859 - RNA, 21 nt, Artificial Sequence
  Chemically synthesized
gcuacacucagugcucccaau

SEQ ID NO: 69860 - RNA, 21 nt, Artificial Sequence
  Chemically synthesized
auggaaugagggugaaauuca

SEQ ID NO: 69861 - RNA, 21 nt, Artificial Sequence
  Chemically synthesized
guggucucucugguuccugaa

SEQ ID NO: 69862 - RNA, 21 nt, Artificial Sequence
  Chemically synthesized
gccacacuuuucaaguguaua

SEQ ID NO: 69863 - RNA, 21 nt, Artificial Sequence
  Chemically synthesized
aacuaaucagccaccuucaga

SEQ ID NO: 69864 - RNA, 21 nt, Artificial Sequence
  Chemically synthesized
agucgucuacuaugccucgga

SEQ ID NO: 69865 - RNA, 21 nt, Artificial Sequence
  Chemically synthesized
agaaauagcugagaaucagga

SEQ ID NO: 69866 - RNA, 21 nt, Artificial Sequence
  Chemically synthesized
gauugaagcccagcaacaauu

SEQ ID NO: 69867 - RNA, 21 nt, Artificial Sequence
  Chemically synthesized
ggugaauaucgaagaaaggag

SEQ ID NO: 69868 - RNA, 21 nt, Artificial Sequence
  Chemically synthesized
uaugcgcuuugggauuaugaa

SEQ ID NO: 69869 - RNA, 21 nt, Artificial Sequence
  Chemically synthesized
gacugcugcagauaagugcga

SEQ ID NO: 69870 - RNA, 21 nt, Artificial Sequence
  Chemically synthesized
guaacaacguccaagugugua

SEQ ID NO: 69871 - RNA, 21 nt, Artificial Sequence
  Chemically synthesized
cugguacaguuugguguaaau

SEQ ID NO: 69872 - RNA, 21 nt, Artificial Sequence
  Chemically synthesized
aggcaucacggcucuucacaa

SEQ ID NO: 69873 - RNA, 21 nt, Artificial Sequence
  Chemically synthesized
cgcucauggaaugagggugaa

SEQ ID NO: 69874 - RNA, 21 nt, Artificial Sequence
  Chemically synthesized
gcucagaaagcccaguagaaa

SEQ ID NO: 69875 - RNA, 21 nt, Artificial Sequence
  Chemically synthesized
cugaccuagaagccuuacgaa

SEQ ID NO: 69876 - RNA, 21 nt, Artificial Sequence
  Chemically synthesized
aagacucauaccagagggcca

SEQ ID NO: 69877 - RNA, 21 nt, Artificial Sequence
  Chemically synthesized
caccuuacuuccacccuucag

SEQ ID NO: 69878 - RNA, 21 nt, Artificial Sequence
  Chemically synthesized
uggaguccuucaaaugcagau

SEQ ID NO: 69879 - RNA, 21 nt, Artificial Sequence
  Chemically synthesized
ccugauuggaguccuucaaau

SEQ ID NO: 69880 - RNA, 21 nt, Artificial Sequence
  Chemically synthesized
cagacacugcccaacaugaga

SEQ ID NO: 69881 - RNA, 21 nt, Artificial Sequence
  Chemically synthesized
ccaguuucaucugauggaaau

SEQ ID NO: 69882 - RNA, 21 nt, Artificial Sequence
  Chemically synthesized
cuaccaguuucaucugaugga

SEQ ID NO: 69883 - RNA, 21 nt, Artificial Sequence
  Chemically synthesized
gcuugaucgccucuauaagga

SEQ ID NO: 69884 - RNA, 21 nt, Artificial Sequence
  Chemically synthesized
agaucagcgacaacagcaaca

SEQ ID NO: 69885 - RNA, 21 nt, Artificial Sequence
  Chemically synthesized
gguccaagaugaugccgaugu

SEQ ID NO: 69886 - RNA, 21 nt, Artificial Sequence
  Chemically synthesized
guuaguugguugucagugaac

SEQ ID NO: 69887 - RNA, 21 nt, Artificial Sequence
  Chemically synthesized
aaccaguccuccugccagaaa

SEQ ID NO: 69888 - RNA, 21 nt, Artificial Sequence
  Chemically synthesized
ugguguaaaaguuccugguga

SEQ ID NO: 69889 - RNA, 21 nt, Artificial Sequence
  Chemically synthesized
agaaugucucuagaagagaau

SEQ ID NO: 69890 - RNA, 21 nt, Artificial Sequence
  Chemically synthesized
cugggacuguacccaagaauu

SEQ ID NO: 69891 - RNA, 21 nt, Artificial Sequence
  Chemically synthesized
ugcugggacuguacccaagaa

SEQ ID NO: 69892 - RNA, 21 nt, Artificial Sequence
  Chemically synthesized
cuguguuugccaugaccuaca

SEQ ID NO: 69893 - RNA, 21 nt, Artificial Sequence
  Chemically synthesized
ccauuacauugugcugccuca

SEQ ID NO: 69894 - RNA, 21 nt, Artificial Sequence
  Chemically synthesized
gauggauggacuccauuacau

SEQ ID NO: 69895 - RNA, 21 nt, Artificial Sequence
  Chemically synthesized
cguuaaguuccugguacaguu

SEQ ID NO: 69896 - RNA, 21 nt, Artificial Sequence
  Chemically synthesized
acauguggagcccgaaaagga

SEQ ID NO: 69897 - RNA, 21 nt, Artificial Sequence
  Chemically synthesized
ucauacccauccaagucagcu

SEQ ID NO: 69898 - RNA, 21 nt, Artificial Sequence
  Chemically synthesized
guuugauguucuucaacgauu

SEQ ID NO: 69899 - RNA, 21 nt, Artificial Sequence
  Chemically synthesized
agcuuuuauaucagaggacca

SEQ ID NO: 69900 - RNA, 21 nt, Artificial Sequence
  Chemically synthesized
aguagaagaacugaccaggca

SEQ ID NO: 69901 - RNA, 21 nt, Artificial Sequence
  Chemically synthesized
caauugcuggcaacuaaggaa

SEQ ID NO: 69902 - RNA, 21 nt, Artificial Sequence
  Chemically synthesized
aucucaggauccaaguuuaaa

SEQ ID NO: 69903 - RNA, 21 nt, Artificial Sequence
  Chemically synthesized
aagaaggagacugcaugacaa

SEQ ID NO: 69904 - RNA, 21 nt, Artificial Sequence
  Chemically synthesized
gcuuugggauuaugaaccuca

SEQ ID NO: 69905 - RNA, 21 nt, Artificial Sequence
  Chemically synthesized
agucauuuaugcgcuuuggga

SEQ ID NO: 69906 - RNA, 21 nt, Artificial Sequence
  Chemically synthesized
cauugugcugccucauguaac

SEQ ID NO: 69907 - RNA, 21 nt, Artificial Sequence
  Chemically synthesized
gagaauuugaccuuguacaga

SEQ ID NO: 69908 - RNA, 21 nt, Artificial Sequence
  Chemically synthesized
acugcuagauucgucuuugga

SEQ ID NO: 69909 - RNA, 21 nt, Artificial Sequence
  Chemically synthesized
uuuacauguggagcccgaaaa

SEQ ID NO: 69910 - RNA, 21 nt, Artificial Sequence
  Chemically synthesized
aucauacccauccaagucagc

SEQ ID NO: 69911 - RNA, 21 nt, Artificial Sequence
  Chemically synthesized
agaccaucucugucccaucau

SEQ ID NO: 69912 - RNA, 21 nt, Artificial Sequence
  Chemically synthesized
caguugcggauaaugagcgaa

SEQ ID NO: 69913 - RNA, 21 nt, Artificial Sequence
  Chemically synthesized
ccuccuguuccuacaaaacca

SEQ ID NO: 69914 - RNA, 21 nt, Artificial Sequence
  Chemically synthesized
ugaugcaguagaccaguccaa

SEQ ID NO: 69915 - RNA, 21 nt, Artificial Sequence
  Chemically synthesized
acuaaaggcucuaaaauccau

SEQ ID NO: 69916 - RNA, 21 nt, Artificial Sequence
  Chemically synthesized
ccugaauugcuggugaagcca

SEQ ID NO: 69917 - RNA, 21 nt, Artificial Sequence
  Chemically synthesized
acuccagaaacaauaugcaga

SEQ ID NO: 69918 - RNA, 21 nt, Artificial Sequence
  Chemically synthesized
caagaugaugccgauguuucu

SEQ ID NO: 69919 - RNA, 21 nt, Artificial Sequence
  Chemically synthesized
aacagagggaguguuugaaua

SEQ ID NO: 69920 - RNA, 21 nt, Artificial Sequence
  Chemically synthesized
agaaguuccaguuacuccaga

SEQ ID NO: 69921 - RNA, 21 nt, Artificial Sequence
  Chemically synthesized
aaggccacguggaacagaaga

SEQ ID NO: 69922 - RNA, 21 nt, Artificial Sequence
  Chemically synthesized
gcuaaaagaaauagcugagaa

SEQ ID NO: 69923 - RNA, 21 nt, Artificial Sequence
  Chemically synthesized
acaagaucagcgacaacagca

SEQ ID NO: 69924 - RNA, 21 nt, Artificial Sequence
  Chemically synthesized
guuccuggugaauaucgaaga

SEQ ID NO: 69925 - RNA, 21 nt, Artificial Sequence
  Chemically synthesized
ggccugaaacuuccacacaga

SEQ ID NO: 69926 - RNA, 21 nt, Artificial Sequence
  Chemically synthesized
gcuuggccugaaacuuccaca

SEQ ID NO: 69927 - RNA, 21 nt, Artificial Sequence
  Chemically synthesized
gagggauauguuccacguaac

SEQ ID NO: 69928 - RNA, 21 nt, Artificial Sequence
  Chemically synthesized
gauuaugaaccucagaaugau

SEQ ID NO: 69929 - RNA, 21 nt, Artificial Sequence
  Chemically synthesized
aguucaggagaagaugggcau

SEQ ID NO: 69930 - RNA, 21 nt, Artificial Sequence
  Chemically synthesized
cacucagugcucccaauuucu

SEQ ID NO: 69931 - RNA, 21 nt, Artificial Sequence
  Chemically synthesized
gucucucugccuccugguaaa

SEQ ID NO: 69932 - RNA, 21 nt, Artificial Sequence
  Chemically synthesized
uauuuacauguggagcccgaa

SEQ ID NO: 69933 - RNA, 21 nt, Artificial Sequence
  Chemically synthesized
caguagaaauccagaauccau

SEQ ID NO: 69934 - RNA, 21 nt, Artificial Sequence
  Chemically synthesized
ggccacucagcccaacuaaau

SEQ ID NO: 69935 - RNA, 21 nt, Artificial Sequence
  Chemically synthesized
ccaguugcggauaaugagcga

SEQ ID NO: 69936 - RNA, 21 nt, Artificial Sequence
  Chemically synthesized
cuccagguucuaagcaagaaa

SEQ ID NO: 69937 - RNA, 21 nt, Artificial Sequence
  Chemically synthesized
ccaugggaacuaaaccaaaac

SEQ ID NO: 69938 - RNA, 21 nt, Artificial Sequence
  Chemically synthesized
ucagccaccuucagacauuaa

SEQ ID NO: 69939 - RNA, 21 nt, Artificial Sequence
  Chemically synthesized
cuccuguuccuacaaaaccaa

SEQ ID NO: 69940 - RNA, 21 nt, Artificial Sequence
  Chemically synthesized
guaccaccuccuguuccuaca

SEQ ID NO: 69941 - RNA, 21 nt, Artificial Sequence
  Chemically synthesized
ggcuaaaguaccaccuccugu

SEQ ID NO: 69942 - RNA, 21 nt, Artificial Sequence
  Chemically synthesized
cucaauguuugaugcaguaga

SEQ ID NO: 69943 - RNA, 21 nt, Artificial Sequence
  Chemically synthesized
gucccuauauccagucgucua

SEQ ID NO: 69944 - RNA, 21 nt, Artificial Sequence
  Chemically synthesized
gcaguaggucccuauauccag

SEQ ID NO: 69945 - RNA, 21 nt, Artificial Sequence
  Chemically synthesized
ugcaguaggucccuauaucca

SEQ ID NO: 69946 - RNA, 21 nt, Artificial Sequence
  Chemically synthesized
cagauugaagcccagcaacaa

SEQ ID NO: 69947 - RNA, 21 nt, Artificial Sequence
  Chemically synthesized
uauugaaacuaagcuacggua

SEQ ID NO: 69948 - RNA, 21 nt, Artificial Sequence
  Chemically synthesized
cuguuaguugguugucaguga

SEQ ID NO: 69949 - RNA, 21 nt, Artificial Sequence
  Chemically synthesized
cuacaagaauccugucuagua

SEQ ID NO: 69950 - RNA, 21 nt, Artificial Sequence
  Chemically synthesized
aaagaaggagacugcaugaca

SEQ ID NO: 69951 - RNA, 21 nt, Artificial Sequence
  Chemically synthesized
uuaugaaccucagaaugauga

SEQ ID NO: 69952 - RNA, 21 nt, Artificial Sequence
  Chemically synthesized
cauguaacaacguccaagugu

SEQ ID NO: 69953 - RNA, 21 nt, Artificial Sequence
  Chemically synthesized
gacaaacuugcguaaaacugg

SEQ ID NO: 69954 - RNA, 21 nt, Artificial Sequence
  Chemically synthesized
ugugcuugauguguaccugga

SEQ ID NO: 69955 - RNA, 21 nt, Artificial Sequence
  Chemically synthesized
cuugauuaugagccugaggga

SEQ ID NO: 69956 - RNA, 21 nt, Artificial Sequence
  Chemically synthesized
gccgauguuucuuaccgugua

SEQ ID NO: 69957 - RNA, 21 nt, Artificial Sequence
  Chemically synthesized
cucugucccaucauacccauc

SEQ ID NO: 69958 - RNA, 21 nt, Artificial Sequence
  Chemically synthesized
ggccaaauauucagaagcuuu

SEQ ID NO: 69959 - RNA, 21 nt, Artificial Sequence
  Chemically synthesized
ccuaaugggccaaauauucag

SEQ ID NO: 69960 - RNA, 21 nt, Artificial Sequence
  Chemically synthesized
uccaugggaacuaaaccaaaa

SEQ ID NO: 69961 - RNA, 21 nt, Artificial Sequence
  Chemically synthesized
ccguccaugggaacuaaacca

SEQ ID NO: 69962 - RNA, 21 nt, Artificial Sequence
  Chemically synthesized
gaggaagaaccagagcaguga

SEQ ID NO: 69963 - RNA, 21 nt, Artificial Sequence
  Chemically synthesized
uuggaguccuucaaaugcaga

SEQ ID NO: 69964 - RNA, 21 nt, Artificial Sequence
  Chemically synthesized
aagcguaauucagaaguggca

SEQ ID NO: 69965 - RNA, 21 nt, Artificial Sequence
  Chemically synthesized
aaggcuaaaagaaauagcuga

SEQ ID NO: 69966 - RNA, 21 nt, Artificial Sequence
  Chemically synthesized
aacaaguugcugagcaggaga

SEQ ID NO: 69967 - RNA, 21 nt, Artificial Sequence
  Chemically synthesized
aaaccaguccuccugccagaa

SEQ ID NO: 69968 - RNA, 21 nt, Artificial Sequence
  Chemically synthesized
guuuucagcagcugcuccuaa

SEQ ID NO: 69969 - RNA, 21 nt, Artificial Sequence
  Chemically synthesized
uguaaaaguuccuggugaaua

SEQ ID NO: 69970 - RNA, 21 nt, Artificial Sequence
  Chemically synthesized
gacaauguagcuugaaagcga

SEQ ID NO: 69971 - RNA, 21 nt, Artificial Sequence
  Chemically synthesized
cauccacagggaagacgaaga

SEQ ID NO: 69972 - RNA, 21 nt, Artificial Sequence
  Chemically synthesized
gagcugcccaugaaagaagga

SEQ ID NO: 69973 - RNA, 21 nt, Artificial Sequence
  Chemically synthesized
augggcauaaugaauaaagga

SEQ ID NO: 69974 - RNA, 21 nt, Artificial Sequence
  Chemically synthesized
ugauggauggacuccauuaca

SEQ ID NO: 69975 - RNA, 21 nt, Artificial Sequence
  Chemically synthesized
cguaaaacuggcucagagcgu

SEQ ID NO: 69976 - RNA, 21 nt, Artificial Sequence
  Chemically synthesized
ugauuaugagccugagggagu

SEQ ID NO: 69977 - RNA, 21 nt, Artificial Sequence
  Chemically synthesized
auuuacauguggagcccgaaa

SEQ ID NO: 69978 - RNA, 21 nt, Artificial Sequence
  Chemically synthesized
ccaguagaaauccagaaucca

SEQ ID NO: 69979 - RNA, 21 nt, Artificial Sequence
  Chemically synthesized
ugaccaagacucauaccagag

SEQ ID NO: 69980 - RNA, 21 nt, Artificial Sequence
  Chemically synthesized
uacuuccacccuucagaaaac

SEQ ID NO: 69981 - RNA, 21 nt, Artificial Sequence
  Chemically synthesized
caguuguuccguccaugggaa

SEQ ID NO: 69982 - RNA, 21 nt, Artificial Sequence
  Chemically synthesized
augcucagguugcaaauaaaa

SEQ ID NO: 69983 - RNA, 21 nt, Artificial Sequence
  Chemically synthesized
gaugcaguagaccaguccaau

SEQ ID NO: 69984 - RNA, 21 nt, Artificial Sequence
  Chemically synthesized
ugggaaugcucuggaucaagu

SEQ ID NO: 69985 - RNA, 21 nt, Artificial Sequence
  Chemically synthesized
ccuauauccagucgucuacua

SEQ ID NO: 69986 - RNA, 21 nt, Artificial Sequence
  Chemically synthesized
ccaugacaaucagucugcagu

SEQ ID NO: 69987 - RNA, 21 nt, Artificial Sequence
  Chemically synthesized
acaacaagaucagcgacaaca

SEQ ID NO: 69988 - RNA, 21 nt, Artificial Sequence
  Chemically synthesized
gcuacgguaccaguaauuaga

SEQ ID NO: 69989 - RNA, 21 nt, Artificial Sequence
  Chemically synthesized
cacuuguauauugucagugaa

SEQ ID NO: 69990 - RNA, 21 nt, Artificial Sequence
  Chemically synthesized
caucuacgucagcaggccaua

SEQ ID NO: 69991 - RNA, 21 nt, Artificial Sequence
  Chemically synthesized
acuugcugggacuguacccaa

SEQ ID NO: 69992 - RNA, 21 nt, Artificial Sequence
  Chemically synthesized
cugcagauaagugcgaggaaa

SEQ ID NO: 69993 - RNA, 21 nt, Artificial Sequence
  Chemically synthesized
gaacgaaguucgcuucuuccu

SEQ ID NO: 69994 - RNA, 21 nt, Artificial Sequence
  Chemically synthesized
acccauccaagucagcuucug

SEQ ID NO: 69995 - RNA, 21 nt, Artificial Sequence
  Chemically synthesized
gggccaaauauucagaagcuu

SEQ ID NO: 69996 - RNA, 21 nt, Artificial Sequence
  Chemically synthesized
aggguccuaaugggccaaaua

SEQ ID NO: 69997 - RNA, 21 nt, Artificial Sequence
  Chemically synthesized
caaggccucuaaagaaacgua

SEQ ID NO: 69998 - RNA, 21 nt, Artificial Sequence
  Chemically synthesized
cuaacgcaccaaggccucuaa

SEQ ID NO: 69999 - RNA, 21 nt, Artificial Sequence
  Chemically synthesized
ccgaaaccagagugaugcuga

SEQ ID NO: 70000 - RNA, 21 nt, Artificial Sequence
  Chemically synthesized
agauaucuugcgggaugcuca

SEQ ID NO: 70001 - RNA, 21 nt, Artificial Sequence
  Chemically synthesized
aggaagaaccagagcagugaa

SEQ ID NO: 70002 - RNA, 21 nt, Artificial Sequence
  Chemically synthesized
uccgcugagggagaaagagaa

SEQ ID NO: 70003 - RNA, 21 nt, Artificial Sequence
  Chemically synthesized
gagcagaaugccaagcuacaa

SEQ ID NO: 70004 - RNA, 21 nt, Artificial Sequence
  Chemically synthesized
ccaagaugaugccgauguuuc

SEQ ID NO: 70005 - RNA, 21 nt, Artificial Sequence
  Chemically synthesized
cguccuggcugugucaaaagu

SEQ ID NO: 70006 - RNA, 21 nt, Artificial Sequence
  Chemically synthesized
aaucaggaagcuaagcuaaaa

SEQ ID NO: 70007 - RNA, 21 nt, Artificial Sequence
  Chemically synthesized
cuaaggaacagcgcuuaaagu

SEQ ID NO: 70008 - RNA, 21 nt, Artificial Sequence
  Chemically synthesized
aguccuaggauggaucugacu

SEQ ID NO: 70009 - RNA, 21 nt, Artificial Sequence
  Chemically synthesized
gaauucaccauuagaggacau

SEQ ID NO: 70010 - RNA, 21 nt, Artificial Sequence
  Chemically synthesized
augaagaaugucucuagaaga

SEQ ID NO: 70011 - RNA, 21 nt, Artificial Sequence
  Chemically synthesized
gcgaugaagaaugucucuaga

SEQ ID NO: 70012 - RNA, 21 nt, Artificial Sequence
  Chemically synthesized
aagcgaugaagaaugucucua

SEQ ID NO: 70013 - RNA, 21 nt, Artificial Sequence
  Chemically synthesized
gacaaaggagcuuggccugaa

SEQ ID NO: 70014 - RNA, 21 nt, Artificial Sequence
  Chemically synthesized
acuguacccaagaauuaaacc

SEQ ID NO: 70015 - RNA, 21 nt, Artificial Sequence
  Chemically synthesized
uuaugcgcuuugggauuauga

SEQ ID NO: 70016 - RNA, 21 nt, Artificial Sequence
  Chemically synthesized
cauuuaugcgcuuugggauua

SEQ ID NO: 70017 - RNA, 21 nt, Artificial Sequence
  Chemically synthesized
ugacaugcagacugcugcaga

SEQ ID NO: 70018 - RNA, 21 nt, Artificial Sequence
  Chemically synthesized
uagugauggauggacuccauu

SEQ ID NO: 70019 - RNA, 21 nt, Artificial Sequence
  Chemically synthesized
uguaaaugcugcugauaguga

SEQ ID NO: 70020 - RNA, 21 nt, Artificial Sequence
  Chemically synthesized
uuuggaagucagaggaacgaa

SEQ ID NO: 70021 - RNA, 21 nt, Artificial Sequence
  Chemically synthesized
ucaggagaaccaugaaaacga

SEQ ID NO: 70022 - RNA, 21 nt, Artificial Sequence
  Chemically synthesized
gggaugcucagguugcaaaua

SEQ ID NO: 70023 - RNA, 21 nt, Artificial Sequence
  Chemically synthesized
gaaacaaauugaaucaagagc

SEQ ID NO: 70024 - RNA, 21 nt, Artificial Sequence
  Chemically synthesized
cuauaaggagcugcagcuaag

SEQ ID NO: 70025 - RNA, 21 nt, Artificial Sequence
  Chemically synthesized
ugggaaacuuguggaggaaau

SEQ ID NO: 70026 - RNA, 21 nt, Artificial Sequence
  Chemically synthesized
uaaggaacagcgcuuaaaguu

SEQ ID NO: 70027 - RNA, 21 nt, Artificial Sequence
  Chemically synthesized
aaaggagaacgguguuaauag

SEQ ID NO: 70028 - RNA, 21 nt, Artificial Sequence
  Chemically synthesized
cauagcugacuuuaaaaacag

SEQ ID NO: 70029 - RNA, 21 nt, Artificial Sequence
  Chemically synthesized
guauauugucagugaagaacu

SEQ ID NO: 70030 - RNA, 21 nt, Artificial Sequence
  Chemically synthesized
aaaggaccagugccgucacau

SEQ ID NO: 70031 - RNA, 21 nt, Artificial Sequence
  Chemically synthesized
aaaucagcucucuguccuguu

SEQ ID NO: 70032 - RNA, 21 nt, Artificial Sequence
  Chemically synthesized
acugcaugacaaucauccaca

SEQ ID NO: 70033 - RNA, 21 nt, Artificial Sequence
  Chemically synthesized
gaguucaggagaagaugggca

SEQ ID NO: 70034 - RNA, 21 nt, Artificial Sequence
  Chemically synthesized
auuucuuuauggaguucagga

SEQ ID NO: 70035 - RNA, 21 nt, Artificial Sequence
  Chemically synthesized
ugauguguaccuggaggagua

SEQ ID NO: 70036 - RNA, 21 nt, Artificial Sequence
  Chemically synthesized
cagaauaacccagaagaacca

SEQ ID NO: 70037 - RNA, 21 nt, Artificial Sequence
  Chemically synthesized
acaacagcccaaaucuccaga

SEQ ID NO: 70038 - RNA, 21 nt, Artificial Sequence
  Chemically synthesized
ccauccaagucagcuucugug

SEQ ID NO: 70039 - RNA, 21 nt, Artificial Sequence
  Chemically synthesized
uuauaucagaggaccaccaua

SEQ ID NO: 70040 - RNA, 21 nt, Artificial Sequence
  Chemically synthesized
cgaauguuugauguucuucaa

SEQ ID NO: 70041 - RNA, 21 nt, Artificial Sequence
  Chemically synthesized
aguugcggauaaugagcgaau

SEQ ID NO: 70042 - RNA, 21 nt, Artificial Sequence
  Chemically synthesized
cagagggccacacuuuucaag

SEQ ID NO: 70043 - RNA, 21 nt, Artificial Sequence
  Chemically synthesized
ggaacuaaaccaaaaccagca

SEQ ID NO: 70044 - RNA, 21 nt, Artificial Sequence
  Chemically synthesized
cagugaagauaucuugcggga

SEQ ID NO: 70045 - RNA, 21 nt, Artificial Sequence
  Chemically synthesized
aaugggaaacuuguggaggaa

SEQ ID NO: 70046 - RNA, 21 nt, Artificial Sequence
  Chemically synthesized
caauccuguuuucuacaagaa

SEQ ID NO: 70047 - RNA, 21 nt, Artificial Sequence
  Chemically synthesized
aauuaaaccaagacaaaggag

SEQ ID NO: 70048 - RNA, 21 nt, Artificial Sequence
  Chemically synthesized
augacaaucauccacagggaa

SEQ ID NO: 70049 - RNA, 21 nt, Artificial Sequence
  Chemically synthesized
acaugcagacugcugcagaua

SEQ ID NO: 70050 - RNA, 21 nt, Artificial Sequence
  Chemically synthesized
acauugugcugccucauguaa

SEQ ID NO: 70051 - RNA, 21 nt, Artificial Sequence
  Chemically synthesized
agaauaacccagaagaaccaa

SEQ ID NO: 70052 - RNA, 21 nt, Artificial Sequence
  Chemically synthesized
aggccuugauuaugagccuga

SEQ ID NO: 70053 - RNA, 21 nt, Artificial Sequence
  Chemically synthesized
ugccaguacagagaacaguga

SEQ ID NO: 70054 - RNA, 21 nt, Artificial Sequence
  Chemically synthesized
ccagaauccauauuuacaugu

SEQ ID NO: 70055 - RNA, 21 nt, Artificial Sequence
  Chemically synthesized
aacagcaggcgccaggaaaaa

SEQ ID NO: 70056 - RNA, 21 nt, Artificial Sequence
  Chemically synthesized
gaccguggcagcaaguucaau

SEQ ID NO: 70057 - RNA, 21 nt, Artificial Sequence
  Chemically synthesized
gcuaaaguaccaccuccuguu

SEQ ID NO: 70058 - RNA, 21 nt, Artificial Sequence
  Chemically synthesized
acugggaaugcucuggaucaa

SEQ ID NO: 70059 - RNA, 21 nt, Artificial Sequence
  Chemically synthesized
uccaguuacuccagaaacaau

SEQ ID NO: 70060 - RNA, 21 nt, Artificial Sequence
  Chemically synthesized
gcacuucacagaaguuccagu

SEQ ID NO: 70061 - RNA, 21 nt, Artificial Sequence
  Chemically synthesized
ugucaaaaguagaagaacuga

SEQ ID NO: 70062 - RNA, 21 nt, Artificial Sequence
  Chemically synthesized
guuccagcaaaaacagaggga

SEQ ID NO: 70063 - RNA, 21 nt, Artificial Sequence
  Chemically synthesized
agauugaagcccagcaacaau

SEQ ID NO: 70064 - RNA, 21 nt, Artificial Sequence
  Chemically synthesized
auggaucugacucuugcugaa

SEQ ID NO: 70065 - RNA, 21 nt, Artificial Sequence
  Chemically synthesized
uaguugguugucagugaacaa

SEQ ID NO: 70066 - RNA, 21 nt, Artificial Sequence
  Chemically synthesized
uguagcacucagauaaguaua

SEQ ID NO: 70067 - RNA, 21 nt, Artificial Sequence
  Chemically synthesized
uagaagagaaugaaggauuga

SEQ ID NO: 70068 - RNA, 21 nt, Artificial Sequence
  Chemically synthesized
uggcaaaaauuucacaagacu

SEQ ID NO: 70069 - RNA, 21 nt, Artificial Sequence
  Chemically synthesized
uguuucuuaccguguaucuca

SEQ ID NO: 70070 - RNA, 21 nt, Artificial Sequence
  Chemically synthesized
guaaaugcugcugauagugau

SEQ ID NO: 70071 - RNA, 21 nt, Artificial Sequence
  Chemically synthesized
gccuccugguaaaaggacaaa

SEQ ID NO: 70072 - RNA, 21 nt, Artificial Sequence
  Chemically synthesized
agacaacagcccaaaucucca

SEQ ID NO: 70073 - RNA, 21 nt, Artificial Sequence
  Chemically synthesized
uaacgcaccaaggccucuaaa

SEQ ID NO: 70074 - RNA, 21 nt, Artificial Sequence
  Chemically synthesized
auugcugcugcccagaaucaa

SEQ ID NO: 70075 - RNA, 21 nt, Artificial Sequence
  Chemically synthesized
cuguaauugcugcugcccaga

SEQ ID NO: 70076 - RNA, 21 nt, Artificial Sequence
  Chemically synthesized
uucuccagguucuaagcaaga

SEQ ID NO: 70077 - RNA, 21 nt, Artificial Sequence
  Chemically synthesized
ugaugauggagagguuccgcu

SEQ ID NO: 70078 - RNA, 21 nt, Artificial Sequence
  Chemically synthesized
cuggaucaaguugaugaugga

SEQ ID NO: 70079 - RNA, 21 nt, Artificial Sequence
  Chemically synthesized
ugaaaauacagacacugccca

SEQ ID NO: 70080 - RNA, 21 nt, Artificial Sequence
  Chemically synthesized
aagaaggcagcucuacagcaa

SEQ ID NO: 70081 - RNA, 21 nt, Artificial Sequence
  Chemically synthesized
guccuggcugugucaaaagua

SEQ ID NO: 70082 - RNA, 21 nt, Artificial Sequence
  Chemically synthesized
cuaaaaaaagugagagcacuu

SEQ ID NO: 70083 - RNA, 21 nt, Artificial Sequence
  Chemically synthesized
gaucagcgacaacagcaacaa

SEQ ID NO: 70084 - RNA, 21 nt, Artificial Sequence
  Chemically synthesized
aacuaaggaacagcgcuuaaa

SEQ ID NO: 70085 - RNA, 21 nt, Artificial Sequence
  Chemically synthesized
cgccagcagcaacagauugaa

SEQ ID NO: 70086 - RNA, 21 nt, Artificial Sequence
  Chemically synthesized
ucagcagcugcuccuaaacca

SEQ ID NO: 70087 - RNA, 21 nt, Artificial Sequence
  Chemically synthesized
aagaaugucucuagaagagaa

SEQ ID NO: 70088 - RNA, 21 nt, Artificial Sequence
  Chemically synthesized
aggagacugcaugacaaucau

SEQ ID NO: 70089 - RNA, 21 nt, Artificial Sequence
  Chemically synthesized
gaguggaccaagaucucagga

SEQ ID NO: 70090 - RNA, 21 nt, Artificial Sequence
  Chemically synthesized
auuugaccuuguacagagaau

SEQ ID NO: 70091 - RNA, 21 nt, Artificial Sequence
  Chemically synthesized
aaguguauaugguaagccugu

SEQ ID NO: 70092 - RNA, 21 nt, Artificial Sequence
  Chemically synthesized
agcgcguugaccaagacucau

SEQ ID NO: 70093 - RNA, 21 nt, Artificial Sequence
  Chemically synthesized
ccaccuucagacauuaagcca

SEQ ID NO: 70094 - RNA, 21 nt, Artificial Sequence
  Chemically synthesized
guaccucaaagcacugggaau

SEQ ID NO: 70095 - RNA, 21 nt, Artificial Sequence
  Chemically synthesized
agccaaggcucugcuucugua

SEQ ID NO: 70096 - RNA, 21 nt, Artificial Sequence
  Chemically synthesized
gcucuacagcaaaaagaaaau

SEQ ID NO: 70097 - RNA, 21 nt, Artificial Sequence
  Chemically synthesized
uucagaaguggcagucaugga

SEQ ID NO: 70098 - RNA, 21 nt, Artificial Sequence
  Chemically synthesized
aacaacagagggaguguuuga

SEQ ID NO: 70099 - RNA, 21 nt, Artificial Sequence
  Chemically synthesized
caagagcagaaugccaagcua

SEQ ID NO: 70100 - RNA, 21 nt, Artificial Sequence
  Chemically synthesized
agcacuuaaaggccacgugga

SEQ ID NO: 70101 - RNA, 21 nt, Artificial Sequence
  Chemically synthesized
uugguugucagugaacaauaa

SEQ ID NO: 70102 - RNA, 21 nt, Artificial Sequence
  Chemically synthesized
cuuguauauugucagugaaga

SEQ ID NO: 70103 - RNA, 21 nt, Artificial Sequence
  Chemically synthesized
ugggcaguugggaaaucagcu

SEQ ID NO: 70104 - RNA, 21 nt, Artificial Sequence
  Chemically synthesized
gucccguguagcacucagaua

SEQ ID NO: 70105 - RNA, 21 nt, Artificial Sequence
  Chemically synthesized
acaauguagcuugaaagcgau

SEQ ID NO: 70106 - RNA, 21 nt, Artificial Sequence
  Chemically synthesized
uugggauuaugaaccucagaa

SEQ ID NO: 70107 - RNA, 21 nt, Artificial Sequence
  Chemically synthesized
uuugggauuaugaaccucaga

SEQ ID NO: 70108 - RNA, 21 nt, Artificial Sequence
  Chemically synthesized
gagucauuuaugcgcuuuggg

SEQ ID NO: 70109 - RNA, 21 nt, Artificial Sequence
  Chemically synthesized
uguaaauguaaaugcugcuga

SEQ ID NO: 70110 - RNA, 21 nt, Artificial Sequence
  Chemically synthesized
agagcguaucgcucauggaau

SEQ ID NO: 70111 - RNA, 21 nt, Artificial Sequence
  Chemically synthesized
uccacaugugcuugaugugua

SEQ ID NO: 70112 - RNA, 21 nt, Artificial Sequence
  Chemically synthesized
gaauccauauuuacaugugga

SEQ ID NO: 70113 - RNA, 21 nt, Artificial Sequence
  Chemically synthesized
guagaaauccagaauccauau

SEQ ID NO: 70114 - RNA, 21 nt, Artificial Sequence
  Chemically synthesized
gaccaucucugucccaucaua

SEQ ID NO: 70115 - RNA, 21 nt, Artificial Sequence
  Chemically synthesized
gaaagaaacugucuaacgcac

SEQ ID NO: 70116 - RNA, 21 nt, Artificial Sequence
  Chemically synthesized
acguccaguugcggauaauga

SEQ ID NO: 70117 - RNA, 21 nt, Artificial Sequence
  Chemically synthesized
ggccacacuuuucaaguguau

SEQ ID NO: 70118 - RNA, 21 nt, Artificial Sequence
  Chemically synthesized
ggaaaaaacuuccagcaggcu

SEQ ID NO: 70119 - RNA, 21 nt, Artificial Sequence
  Chemically synthesized
ccauguauacgcaacagcagg

SEQ ID NO: 70120 - RNA, 21 nt, Artificial Sequence
  Chemically synthesized
agcauaccuucgguuggccaa

SEQ ID NO: 70121 - RNA, 21 nt, Artificial Sequence
  Chemically synthesized
caccuuccuuugguacucuga

SEQ ID NO: 70122 - RNA, 21 nt, Artificial Sequence
  Chemically synthesized
gguggaucugugcaaagaacc

SEQ ID NO: 70123 - RNA, 21 nt, Artificial Sequence
  Chemically synthesized
cagcaaaaagaaaaucuacca

SEQ ID NO: 70124 - RNA, 21 nt, Artificial Sequence
  Chemically synthesized
ggcuaaaagaaauagcugaga

SEQ ID NO: 70125 - RNA, 21 nt, Artificial Sequence
  Chemically synthesized
ucgccagcagcaacagauuga

SEQ ID NO: 70126 - RNA, 21 nt, Artificial Sequence
  Chemically synthesized
gcugaacuucaggaaauggca

SEQ ID NO: 70127 - RNA, 21 nt, Artificial Sequence
  Chemically synthesized
uagaaacuugcuacagacuua

SEQ ID NO: 70128 - RNA, 21 nt, Artificial Sequence
  Chemically synthesized
guaggcugaauuuuaaucugu

SEQ ID NO: 70129 - RNA, 21 nt, Artificial Sequence
  Chemically synthesized
ugguugucagugaacaauaac

SEQ ID NO: 70130 - RNA, 21 nt, Artificial Sequence
  Chemically synthesized
gucacaucgcugucucugauu

SEQ ID NO: 70131 - RNA, 21 nt, Artificial Sequence
  Chemically synthesized
aaaguuccuggugaauaucga

SEQ ID NO: 70132 - RNA, 21 nt, Artificial Sequence
  Chemically synthesized
uugcugggacuguacccaaga

SEQ ID NO: 70133 - RNA, 21 nt, Artificial Sequence
  Chemically synthesized
ugacaaucauccacagggaag

SEQ ID NO: 70134 - RNA, 21 nt, Artificial Sequence
  Chemically synthesized
ggauggacuccauuacauugu

SEQ ID NO: 70135 - RNA, 21 nt, Artificial Sequence
  Chemically synthesized
gaggguccuaaugggccaaau

SEQ ID NO: 70136 - RNA, 21 nt, Artificial Sequence
  Chemically synthesized
gaauguuugauguucuucaac

SEQ ID NO: 70137 - RNA, 21 nt, Artificial Sequence
  Chemically synthesized
ugucaacaguuguuccgucca

SEQ ID NO: 70138 - RNA, 21 nt, Artificial Sequence
  Chemically synthesized
uaaucagccaccuucagacau

SEQ ID NO: 70139 - RNA, 21 nt, Artificial Sequence
  Chemically synthesized
agugauugccauuuggcugaa

SEQ ID NO: 70140 - RNA, 21 nt, Artificial Sequence
  Chemically synthesized
guacucugaggaagaaccaga

SEQ ID NO: 70141 - RNA, 21 nt, Artificial Sequence
  Chemically synthesized
gcccugauuggaguccuucaa

SEQ ID NO: 70142 - RNA, 21 nt, Artificial Sequence
  Chemically synthesized
ccggaugguuccuuggucauu

SEQ ID NO: 70143 - RNA, 21 nt, Artificial Sequence
  Chemically synthesized
gcaaaaagaaaaucuaccagu

SEQ ID NO: 70144 - RNA, 21 nt, Artificial Sequence
  Chemically synthesized
acaacagcaacaaguugcuga

SEQ ID NO: 70145 - RNA, 21 nt, Artificial Sequence
  Chemically synthesized
ccagcaacaauugcuggcaac

SEQ ID NO: 70146 - RNA, 21 nt, Artificial Sequence
  Chemically synthesized
agaacgguguuaauaguccua

SEQ ID NO: 70147 - RNA, 21 nt, Artificial Sequence
  Chemically synthesized
uccuguugaguguuuucagca

SEQ ID NO: 70148 - RNA, 21 nt, Artificial Sequence
  Chemically synthesized
ucccguguagcacucagauaa

SEQ ID NO: 70149 - RNA, 21 nt, Artificial Sequence
  Chemically synthesized
gcgugaugaaauaaagcaucu

SEQ ID NO: 70150 - RNA, 21 nt, Artificial Sequence
  Chemically synthesized
gaagaauucaccauuagagga

SEQ ID NO: 70151 - RNA, 21 nt, Artificial Sequence
  Chemically synthesized
gauaaggagggauauguucca

SEQ ID NO: 70152 - RNA, 21 nt, Artificial Sequence
  Chemically synthesized
uaugaaccucagaaugaugau

SEQ ID NO: 70153 - RNA, 21 nt, Artificial Sequence
  Chemically synthesized
ccaauuucuuuauggaguuca

SEQ ID NO: 70154 - RNA, 21 nt, Artificial Sequence
  Chemically synthesized
gauaagugcgaggaaauggag

SEQ ID NO: 70155 - RNA, 21 nt, Artificial Sequence
  Chemically synthesized
uucuagagacauucuucaucg

SEQ ID NO: 70156 - RNA, 21 nt, Artificial Sequence
  Chemically synthesized
uuucugaaggguggaaguaag

SEQ ID NO: 70157 - RNA, 21 nt, Artificial Sequence
  Chemically synthesized
uccuuugucuugguuuaauuc

SEQ ID NO: 70158 - RNA, 21 nt, Artificial Sequence
  Chemically synthesized
ucuugguuuaauucuugggua

SEQ ID NO: 70159 - RNA, 21 nt, Artificial Sequence
  Chemically synthesized
uuaauucuuggguacaguccc

SEQ ID NO: 70160 - RNA, 21 nt, Artificial Sequence
  Chemically synthesized
uuucaugggcagcucaucauc

SEQ ID NO: 70161 - RNA, 21 nt, Artificial Sequence
  Chemically synthesized
ugguaugagucuuggucaacg

SEQ ID NO: 70162 - RNA, 21 nt, Artificial Sequence
  Chemically synthesized
uuugguucuucuggguuauuc

SEQ ID NO: 70163 - RNA, 21 nt, Artificial Sequence
  Chemically synthesized
uuucguuuucaugguucuccu

SEQ ID NO: 70164 - RNA, 21 nt, Artificial Sequence
  Chemically synthesized
uuggcauucugcucuugauuc

SEQ ID NO: 70165 - RNA, 21 nt, Artificial Sequence
  Chemically synthesized
uugagcaucucuagcugccug

SEQ ID NO: 70166 - RNA, 21 nt, Artificial Sequence
  Chemically synthesized
uuucuuuagaggccuuggugc

SEQ ID NO: 70167 - RNA, 21 nt, Artificial Sequence
  Chemically synthesized
uuuucugaaggguggaaguaa

SEQ ID NO: 70168 - RNA, 21 nt, Artificial Sequence
  Chemically synthesized
uucuguguggaaguuucaggc

SEQ ID NO: 70169 - RNA, 21 nt, Artificial Sequence
  Chemically synthesized
uuuauuugcaaccugagcauc

SEQ ID NO: 70170 - RNA, 21 nt, Artificial Sequence
  Chemically synthesized
uuauuugcaaccugagcaucc

SEQ ID NO: 70171 - RNA, 21 nt, Artificial Sequence
  Chemically synthesized
uuacguggaacauaucccucc

SEQ ID NO: 70172 - RNA, 21 nt, Artificial Sequence
  Chemically synthesized
ucauuaacacgcuuauccaug

SEQ ID NO: 70173 - RNA, 21 nt, Artificial Sequence
  Chemically synthesized
cugacuuggauggguaugaug

SEQ ID NO: 70174 - RNA, 21 nt, Artificial Sequence
  Chemically synthesized
uuggcuugggaaaagaucugc

SEQ ID NO: 70175 - RNA, 21 nt, Artificial Sequence
  Chemically synthesized
ucugggugcugcuguugauuc

SEQ ID NO: 70176 - RNA, 21 nt, Artificial Sequence
  Chemically synthesized
ucuucaauccuucauucucuu

SEQ ID NO: 70177 - RNA, 21 nt, Artificial Sequence
  Chemically synthesized
ugguuuaauucuuggguacag

SEQ ID NO: 70178 - RNA, 21 nt, Artificial Sequence
  Chemically synthesized
uuaucugcagcagucugcaug

SEQ ID NO: 70179 - RNA, 21 nt, Artificial Sequence
  Chemically synthesized
uaagaaacaucggcaucaucu

SEQ ID NO: 70180 - RNA, 21 nt, Artificial Sequence
  Chemically synthesized
uuuugcuguagagcugccuuc

SEQ ID NO: 70181 - RNA, 21 nt, Artificial Sequence
  Chemically synthesized
uuucuuagcugcagcuccuua

SEQ ID NO: 70182 - RNA, 21 nt, Artificial Sequence
  Chemically synthesized
auucuuggguacagucccagc

SEQ ID NO: 70183 - RNA, 21 nt, Artificial Sequence
  Chemically synthesized
uuuacaccaaacuguaccagg

SEQ ID NO: 70184 - RNA, 21 nt, Artificial Sequence
  Chemically synthesized
uucccaacugcccaauaaaug

SEQ ID NO: 70185 - RNA, 21 nt, Artificial Sequence
  Chemically synthesized
uuuacuagacaggauucuugu

SEQ ID NO: 70186 - RNA, 21 nt, Artificial Sequence
  Chemically synthesized
uggugaauucuucaauccuuc

SEQ ID NO: 70187 - RNA, 21 nt, Artificial Sequence
  Chemically synthesized
aagcugacuuggauggguaug

SEQ ID NO: 70188 - RNA, 21 nt, Artificial Sequence
  Chemically synthesized
uuuaguucccauggacggaac

SEQ ID NO: 70189 - RNA, 21 nt, Artificial Sequence
  Chemically synthesized
uuuuguaggaacaggaggugg

SEQ ID NO: 70190 - RNA, 21 nt, Artificial Sequence
  Chemically synthesized
uguagagcugccuucuucuuc

SEQ ID NO: 70191 - RNA, 21 nt, Artificial Sequence
  Chemically synthesized
uuuugguuuuguaggaacagg

SEQ ID NO: 70192 - RNA, 21 nt, Artificial Sequence
  Chemically synthesized
uuucuuuuugcuguagagcug

SEQ ID NO: 70193 - RNA, 21 nt, Artificial Sequence
  Chemically synthesized
uugucaugguggcugucgauc

SEQ ID NO: 70194 - RNA, 21 nt, Artificial Sequence
  Chemically synthesized
uuaagcgcuguuccuuaguug

SEQ ID NO: 70195 - RNA, 21 nt, Artificial Sequence
  Chemically synthesized
ucuuuuuaaacuuggauccug

SEQ ID NO: 70196 - RNA, 21 nt, Artificial Sequence
  Chemically synthesized
uuaaacuuggauccugagauc

SEQ ID NO: 70197 - RNA, 21 nt, Artificial Sequence
  Chemically synthesized
uucaugggcagcucaucauca

SEQ ID NO: 70198 - RNA, 21 nt, Artificial Sequence
  Chemically synthesized
ucauuaugcccaucuucuccu

SEQ ID NO: 70199 - RNA, 21 nt, Artificial Sequence
  Chemically synthesized
ucacagaagcugacuuggaug

SEQ ID NO: 70200 - RNA, 21 nt, Artificial Sequence
  Chemically synthesized
uaaggcuucuaggucagcauc

SEQ ID NO: 70201 - RNA, 21 nt, Artificial Sequence
  Chemically synthesized
uuugaaggacuccaaucaggg

SEQ ID NO: 70202 - RNA, 21 nt, Artificial Sequence
  Chemically synthesized
uuucccauugcuuagucucuu

SEQ ID NO: 70203 - RNA, 21 nt, Artificial Sequence
  Chemically synthesized
ucugugaagugcugcucauug

SEQ ID NO: 70204 - RNA, 21 nt, Artificial Sequence
  Chemically synthesized
uuccucgcacuuaucugcagc

SEQ ID NO: 70205 - RNA, 21 nt, Artificial Sequence
  Chemically synthesized
uugggcagugucuguauuuuc

SEQ ID NO: 70206 - RNA, 21 nt, Artificial Sequence
  Chemically synthesized
uugcuguugucgcugaucuug

SEQ ID NO: 70207 - RNA, 21 nt, Artificial Sequence
  Chemically synthesized
ugucgcugaucuuguuguuuc

SEQ ID NO: 70208 - RNA, 21 nt, Artificial Sequence
  Chemically synthesized
ucuuucaugggcagcucauca

SEQ ID NO: 70209 - RNA, 21 nt, Artificial Sequence
  Chemically synthesized
uugaacuugcugccacggucu

SEQ ID NO: 70210 - RNA, 21 nt, Artificial Sequence
  Chemically synthesized
uuugguuuaguucccauggac

SEQ ID NO: 70211 - RNA, 21 nt, Artificial Sequence
  Chemically synthesized
uucuugagcaucucuagcugc

SEQ ID NO: 70212 - RNA, 21 nt, Artificial Sequence
  Chemically synthesized
uauuguucacugacaaccaac

SEQ ID NO: 70213 - RNA, 21 nt, Artificial Sequence
  Chemically synthesized
uguagcuuggcauucugcucu

SEQ ID NO: 70214 - RNA, 21 nt, Artificial Sequence
  Chemically synthesized
uuccugauucucagcuauuuc

SEQ ID NO: 70215 - RNA, 21 nt, Artificial Sequence
  Chemically synthesized
uuccgucuggcuuaaugucug

SEQ ID NO: 70216 - RNA, 21 nt, Artificial Sequence
  Chemically synthesized
ucuccaucaucaacuugaucc

SEQ ID NO: 70217 - RNA, 21 nt, Artificial Sequence
  Chemically synthesized
uacuuaucugagugcuacacg

SEQ ID NO: 70218 - RNA, 21 nt, Artificial Sequence
  Chemically synthesized
ucgauuucaucuucgucuucc

SEQ ID NO: 70219 - RNA, 21 nt, Artificial Sequence
  Chemically synthesized
uuggauccugagaucuugguc

SEQ ID NO: 70220 - RNA, 21 nt, Artificial Sequence
  Chemically synthesized
ucuggauuugguucuucuggg

SEQ ID NO: 70221 - RNA, 21 nt, Artificial Sequence
  Chemically synthesized
uauggauucuggauuucuacu

SEQ ID NO: 70222 - RNA, 21 nt, Artificial Sequence
  Chemically synthesized
auuggaauaaauguucucugg

SEQ ID NO: 70223 - RNA, 21 nt, Artificial Sequence
  Chemically synthesized
uugguuuaguucccauggacg

SEQ ID NO: 70224 - RNA, 21 nt, Artificial Sequence
  Chemically synthesized
uuugucucuucgacgcucgug

SEQ ID NO: 70225 - RNA, 21 nt, Artificial Sequence
  Chemically synthesized
ucaacuugauccagagcauuc

SEQ ID NO: 70226 - RNA, 21 nt, Artificial Sequence
  Chemically synthesized
ucccucuguuguuguagcuug

SEQ ID NO: 70227 - RNA, 21 nt, Artificial Sequence
  Chemically synthesized
uuuguuucuuagcugcagcuc

SEQ ID NO: 70228 - RNA, 21 nt, Artificial Sequence
  Chemically synthesized
uuagcuuccugauucucagcu

SEQ ID NO: 70229 - RNA, 21 nt, Artificial Sequence
  Chemically synthesized
auuuacuagacaggauucuug

SEQ ID NO: 70230 - RNA, 21 nt, Artificial Sequence
  Chemically synthesized
ucuguuucagguucuggacug

SEQ ID NO: 70231 - RNA, 21 nt, Artificial Sequence
  Chemically synthesized
uucugggcagcagcaauuaca

SEQ ID NO: 70232 - RNA, 21 nt, Artificial Sequence
  Chemically synthesized
uuuuuuccuggcgccugcugu

SEQ ID NO: 70233 - RNA, 21 nt, Artificial Sequence
  Chemically synthesized
uuauagaggcgaucaagcuca

SEQ ID NO: 70234 - RNA, 21 nt, Artificial Sequence
  Chemically synthesized
ucagcaagagucagauccauc

SEQ ID NO: 70235 - RNA, 21 nt, Artificial Sequence
  Chemically synthesized
uuaaagucagcuaugaucuug

SEQ ID NO: 70236 - RNA, 21 nt, Artificial Sequence
  Chemically synthesized
uccauuuccucgcacuuaucu

SEQ ID NO: 70237 - RNA, 21 nt, Artificial Sequence
  Chemically synthesized
acuuggauggguaugauggga

SEQ ID NO: 70238 - RNA, 21 nt, Artificial Sequence
  Chemically synthesized
uacacuugaaaaguguggccc

SEQ ID NO: 70239 - RNA, 21 nt, Artificial Sequence
  Chemically synthesized
uugcuuagaaccuggagaaag

SEQ ID NO: 70240 - RNA, 21 nt, Artificial Sequence
  Chemically synthesized
uugagaacggacgcacuuucu

SEQ ID NO: 70241 - RNA, 21 nt, Artificial Sequence
  Chemically synthesized
ucuucucuuucucccucagcg

SEQ ID NO: 70242 - RNA, 21 nt, Artificial Sequence
  Chemically synthesized
uugagguacagaagcagagcc

SEQ ID NO: 70243 - RNA, 21 nt, Artificial Sequence
  Chemically synthesized
uuuucuuuuugcuguagagcu

SEQ ID NO: 70244 - RNA, 21 nt, Artificial Sequence
  Chemically synthesized
ucuuuuugcuguagagcugcc

SEQ ID NO: 70245 - RNA, 21 nt, Artificial Sequence
  Chemically synthesized
uccuccacaaguuucccauug

SEQ ID NO: 70246 - RNA, 21 nt, Artificial Sequence
  Chemically synthesized
cuuaguugccagcaauuguug

SEQ ID NO: 70247 - RNA, 21 nt, Artificial Sequence
  Chemically synthesized
uuaguugccagcaauuguugc

SEQ ID NO: 70248 - RNA, 21 nt, Artificial Sequence
  Chemically synthesized
uaggucauggcaaacacagcg

SEQ ID NO: 70249 - RNA, 21 nt, Artificial Sequence
  Chemically synthesized
uucucuguacaaggucaaauu

SEQ ID NO: 70250 - RNA, 21 nt, Artificial Sequence
  Chemically synthesized
ucaaauucucccuccaaagac

SEQ ID NO: 70251 - RNA, 21 nt, Artificial Sequence
  Chemically synthesized
uuccaugagcgauacgcucug

SEQ ID NO: 70252 - RNA, 21 nt, Artificial Sequence
  Chemically synthesized
aacuucguuccucugacuucc

SEQ ID NO: 70253 - RNA, 21 nt, Artificial Sequence
  Chemically synthesized
agaagcugacuuggaugggua

SEQ ID NO: 70254 - RNA, 21 nt, Artificial Sequence
  Chemically synthesized
uucguuuucaugguucuccug

SEQ ID NO: 70255 - RNA, 21 nt, Artificial Sequence
  Chemically synthesized
uuggaauaaauguucucuggg

SEQ ID NO: 70256 - RNA, 21 nt, Artificial Sequence
  Chemically synthesized
uucucugggugcugcuguuga

SEQ ID NO: 70257 - RNA, 21 nt, Artificial Sequence
  Chemically synthesized
ucagccaaauggcaaucacuc

SEQ ID NO: 70258 - RNA, 21 nt, Artificial Sequence
  Chemically synthesized
uuuuuauuugcaaccugagca

SEQ ID NO: 70259 - RNA, 21 nt, Artificial Sequence
  Chemically synthesized
uuccacguggccuuuaagugc

SEQ ID NO: 70260 - RNA, 21 nt, Artificial Sequence
  Chemically synthesized
uccuccagguacacaucaagc

SEQ ID NO: 70261 - RNA, 21 nt, Artificial Sequence
  Chemically synthesized
uuucugagcuggcagucacag

SEQ ID NO: 70262 - RNA, 21 nt, Artificial Sequence
  Chemically synthesized
uuucguaaggcuucuagguca

SEQ ID NO: 70263 - RNA, 21 nt, Artificial Sequence
  Chemically synthesized
ucuaggucagcaucacucugg

SEQ ID NO: 70264 - RNA, 21 nt, Artificial Sequence
  Chemically synthesized
uugucucuucgacgcucguga

SEQ ID NO: 70265 - RNA, 21 nt, Artificial Sequence
  Chemically synthesized
ucuuugcacagauccaccacg

SEQ ID NO: 70266 - RNA, 21 nt, Artificial Sequence
  Chemically synthesized
ugcauuugaaggacuccaauc

SEQ ID NO: 70267 - RNA, 21 nt, Artificial Sequence
  Chemically synthesized
ucaauuuccuccacaaguuuc

SEQ ID NO: 70268 - RNA, 21 nt, Artificial Sequence
  Chemically synthesized
uauuacggguaagucuguagc

SEQ ID NO: 70269 - RNA, 21 nt, Artificial Sequence
  Chemically synthesized
aagucuugugaaauuuuugcc

SEQ ID NO: 70270 - RNA, 21 nt, Artificial Sequence
  Chemically synthesized
uuaucauuaaggcgcgcccac

SEQ ID NO: 70271 - RNA, 21 nt, Artificial Sequence
  Chemically synthesized
augggcagcucaucaucauuc

SEQ ID NO: 70272 - RNA, 21 nt, Artificial Sequence
  Chemically synthesized
ugaaugaccaaggaaccaucc

SEQ ID NO: 70273 - RNA, 21 nt, Artificial Sequence
  Chemically synthesized
uguugcugggcuucaaucugu

SEQ ID NO: 70274 - RNA, 21 nt, Artificial Sequence
  Chemically synthesized
uagaaaacaggauugucgcug

SEQ ID NO: 70275 - RNA, 21 nt, Artificial Sequence
  Chemically synthesized
auugucaugcagucuccuucu

SEQ ID NO: 70276 - RNA, 21 nt, Artificial Sequence
  Chemically synthesized
uaauggaguccauccaucacu

SEQ ID NO: 70277 - RNA, 21 nt, Artificial Sequence
  Chemically synthesized
ugcguuagacaguuucuuucg

SEQ ID NO: 70278 - RNA, 21 nt, Artificial Sequence
  Chemically synthesized
uccugaacugaagaaacaggc

SEQ ID NO: 70279 - RNA, 21 nt, Artificial Sequence
  Chemically synthesized
uaaggugucuuuggaaggcug

SEQ ID NO: 70280 - RNA, 21 nt, Artificial Sequence
  Chemically synthesized
uggacuuucuugcuuagaacc

SEQ ID NO: 70281 - RNA, 21 nt, Artificial Sequence
  Chemically synthesized
ugauccagagcauucccagug

SEQ ID NO: 70282 - RNA, 21 nt, Artificial Sequence
  Chemically synthesized
uggauuuuagagccuuuaguu

SEQ ID NO: 70283 - RNA, 21 nt, Artificial Sequence
  Chemically synthesized
uucuggaguaacuggaacuuc

SEQ ID NO: 70284 - RNA, 21 nt, Artificial Sequence
  Chemically synthesized
uauagaggcgaucaagcucag

SEQ ID NO: 70285 - RNA, 21 nt, Artificial Sequence
  Chemically synthesized
ucuugagcaucucuagcugcc

SEQ ID NO: 70286 - RNA, 21 nt, Artificial Sequence
  Chemically synthesized
ucuagcugccuggucaguucu

SEQ ID NO: 70287 - RNA, 21 nt, Artificial Sequence
  Chemically synthesized
ugaagugcugcucauuguuac

SEQ ID NO: 70288 - RNA, 21 nt, Artificial Sequence
  Chemically synthesized
ucuucaucgcuuucaagcuac

SEQ ID NO: 70289 - RNA, 21 nt, Artificial Sequence
  Chemically synthesized
ccuuugucuugguuuaauucu

SEQ ID NO: 70290 - RNA, 21 nt, Artificial Sequence
  Chemically synthesized
uaauucuuggguacaguccca

SEQ ID NO: 70291 - RNA, 21 nt, Artificial Sequence
  Chemically synthesized
uguagccuuccuccauuuccu

SEQ ID NO: 70292 - RNA, 21 nt, Artificial Sequence
  Chemically synthesized
ucaagcacauguggagccucu

SEQ ID NO: 70293 - RNA, 21 nt, Artificial Sequence
  Chemically synthesized
uucuacugggcuuucugagcu

SEQ ID NO: 70294 - RNA, 21 nt, Artificial Sequence
  Chemically synthesized
uucuuuagaggccuuggugcg

SEQ ID NO: 70295 - RNA, 21 nt, Artificial Sequence
  Chemically synthesized
auguucucugggugcugcugu

SEQ ID NO: 70296 - RNA, 21 nt, Artificial Sequence
  Chemically synthesized
ucugaaggguggaaguaaggu

SEQ ID NO: 70297 - RNA, 21 nt, Artificial Sequence
  Chemically synthesized
uucuuccucagaguaccaaag

SEQ ID NO: 70298 - RNA, 21 nt, Artificial Sequence
  Chemically synthesized
auauagggaccuacugcagcc

SEQ ID NO: 70299 - RNA, 21 nt, Artificial Sequence
  Chemically synthesized
uuuccaucagaugaaacuggu

SEQ ID NO: 70300 - RNA, 21 nt, Artificial Sequence
  Chemically synthesized
uguucaauuuccuccacaagu

SEQ ID NO: 70301 - RNA, 21 nt, Artificial Sequence
  Chemically synthesized
uccugcucagcaacuuguugc

SEQ ID NO: 70302 - RNA, 21 nt, Artificial Sequence
  Chemically synthesized
uccugaaguucagcaagaguc

SEQ ID NO: 70303 - RNA, 21 nt, Artificial Sequence
  Chemically synthesized
uccuuucuucgauauucacca

SEQ ID NO: 70304 - RNA, 21 nt, Artificial Sequence
  Chemically synthesized
uucgauauucaccaggaacuu

SEQ ID NO: 70305 - RNA, 21 nt, Artificial Sequence
  Chemically synthesized
uucuccugaacuccauaaaga

SEQ ID NO: 70306 - RNA, 21 nt, Artificial Sequence
  Chemically synthesized
uuacacacuuggacguuguua

SEQ ID NO: 70307 - RNA, 21 nt, Artificial Sequence
  Chemically synthesized
uucugaauauuuggcccauua

SEQ ID NO: 70308 - RNA, 21 nt, Artificial Sequence
  Chemically synthesized
uuuggcccauuaggacccucu

SEQ ID NO: 70309 - RNA, 21 nt, Artificial Sequence
  Chemically synthesized
uuucagguucuggacugccag

SEQ ID NO: 70310 - RNA, 21 nt, Artificial Sequence
  Chemically synthesized
uuagaaccuggagaaaggguc

SEQ ID NO: 70311 - RNA, 21 nt, Artificial Sequence
  Chemically synthesized
uuugguuuuguaggaacagga

SEQ ID NO: 70312 - RNA, 21 nt, Artificial Sequence
  Chemically synthesized
ugucgauccugccguucuuga

SEQ ID NO: 70313 - RNA, 21 nt, Artificial Sequence
  Chemically synthesized
uuuccuccacaaguuucccau

SEQ ID NO: 70314 - RNA, 21 nt, Artificial Sequence
  Chemically synthesized
uucuguuccacguggccuuua

SEQ ID NO: 70315 - RNA, 21 nt, Artificial Sequence
  Chemically synthesized
uuguagaaaacaggauugucg

SEQ ID NO: 70316 - RNA, 21 nt, Artificial Sequence
  Chemically synthesized
ucucuucuagagacauucuuc

SEQ ID NO: 70317 - RNA, 21 nt, Artificial Sequence
  Chemically synthesized
augcagucuccuucuuucaug

SEQ ID NO: 70318 - RNA, 21 nt, Artificial Sequence
  Chemically synthesized
uuucacccucauuccaugagc

SEQ ID NO: 70319 - RNA, 21 nt, Artificial Sequence
  Chemically synthesized
uuuucaugguucuccugaacu

SEQ ID NO: 70320 - RNA, 21 nt, Artificial Sequence
  Chemically synthesized
ucugaagccugaaugaccaag

SEQ ID NO: 70321 - RNA, 21 nt, Artificial Sequence
  Chemically synthesized
cugaaugaccaaggaaccauc

SEQ ID NO: 70322 - RNA, 21 nt, Artificial Sequence
  Chemically synthesized
caucgcuuucaagcuacauug

SEQ ID NO: 70323 - RNA, 21 nt, Artificial Sequence
  Chemically synthesized
uggaaguuucaggccaagcuc

SEQ ID NO: 70324 - RNA, 21 nt, Artificial Sequence
  Chemically synthesized
uaucccuccuuaucauuaagg

SEQ ID NO: 70325 - RNA, 21 nt, Artificial Sequence
  Chemically synthesized
uguaccaggaacuuaacgauu

SEQ ID NO: 70326 - RNA, 21 nt, Artificial Sequence
  Chemically synthesized
uuucgguaaggauuagauaag

SEQ ID NO: 70327 - RNA, 21 nt, Artificial Sequence
  Chemically synthesized
uguuucagguucuggacugcc

SEQ ID NO: 70328 - RNA, 21 nt, Artificial Sequence
  Chemically synthesized
auuauccgcaacuggacguuc

SEQ ID NO: 70329 - RNA, 21 nt, Artificial Sequence
  Chemically synthesized
ggguuuucugaaggguggaag

SEQ ID NO: 70330 - RNA, 21 nt, Artificial Sequence
  Chemically synthesized
ugcuguagagcugccuucuuc

SEQ ID NO: 70331 - RNA, 21 nt, Artificial Sequence
  Chemically synthesized
uguuguuguagcuuggcauuc

SEQ ID NO: 70332 - RNA, 21 nt, Artificial Sequence
  Chemically synthesized
uuguuguagcuuggcauucug

SEQ ID NO: 70333 - RNA, 21 nt, Artificial Sequence
  Chemically synthesized
uguuguagcuuggcauucugc

SEQ ID NO: 70334 - RNA, 21 nt, Artificial Sequence
  Chemically synthesized
uucuuagcugcagcuccuuau

SEQ ID NO: 70335 - RNA, 21 nt, Artificial Sequence
  Chemically synthesized
uuagcugcagcuccuuauaga

SEQ ID NO: 70336 - RNA, 21 nt, Artificial Sequence
  Chemically synthesized
ucagccacugcagacugauug

SEQ ID NO: 70337 - RNA, 21 nt, Artificial Sequence
  Chemically synthesized
ucuguuuuugcuggaacaaau

SEQ ID NO: 70338 - RNA, 21 nt, Artificial Sequence
  Chemically synthesized
aguuauuguucacugacaacc

SEQ ID NO: 70339 - RNA, 21 nt, Artificial Sequence
  Chemically synthesized
uucuucaucgcuuucaagcua

SEQ ID NO: 70340 - RNA, 21 nt, Artificial Sequence
  Chemically synthesized
ugcagucuccuucuuucaugg

SEQ ID NO: 70341 - RNA, 21 nt, Artificial Sequence
  Chemically synthesized
uugguccacucacaauguccc

SEQ ID NO: 70342 - RNA, 21 nt, Artificial Sequence
  Chemically synthesized
auuuccucgcacuuaucugca

SEQ ID NO: 70343 - RNA, 21 nt, Artificial Sequence
  Chemically synthesized
ucugcaugucacuguagguca

SEQ ID NO: 70344 - RNA, 21 nt, Artificial Sequence
  Chemically synthesized
acauuuacaccaaacuguacc

SEQ ID NO: 70345 - RNA, 21 nt, Artificial Sequence
  Chemically synthesized
aauauuuggcccauuaggacc

SEQ ID NO: 70346 - RNA, 21 nt, Artificial Sequence
  Chemically synthesized
auauuuggcccauuaggaccc

SEQ ID NO: 70347 - RNA, 21 nt, Artificial Sequence
  Chemically synthesized
uggcucuguaauagaacuacg

SEQ ID NO: 70348 - RNA, 21 nt, Artificial Sequence
  Chemically synthesized
uuucaugguucuccugaacug

SEQ ID NO: 70349 - RNA, 21 nt, Artificial Sequence
  Chemically synthesized
cucauuauccgcaacuggacg

SEQ ID NO: 70350 - RNA, 21 nt, Artificial Sequence
  Chemically synthesized
ucugguaugagucuuggucaa

SEQ ID NO: 70351 - RNA, 21 nt, Artificial Sequence
  Chemically synthesized
acuuucuucucuuucucccuc

SEQ ID NO: 70352 - RNA, 21 nt, Artificial Sequence
  Chemically synthesized
uguuucuuagcugcagcuccu

SEQ ID NO: 70353 - RNA, 21 nt, Artificial Sequence
  Chemically synthesized
uguuccacguggccuuuaagu

SEQ ID NO: 70354 - RNA, 21 nt, Artificial Sequence
  Chemically synthesized
uuucccaacugcccaauaaau

SEQ ID NO: 70355 - RNA, 21 nt, Artificial Sequence
  Chemically synthesized
auucuguguggaaguuucagg

SEQ ID NO: 70356 - RNA, 21 nt, Artificial Sequence
  Chemically synthesized
uacguggaacauaucccuccu

SEQ ID NO: 70357 - RNA, 21 nt, Artificial Sequence
  Chemically synthesized
auucgauuucaucuucgucuu

SEQ ID NO: 70358 - RNA, 21 nt, Artificial Sequence
  Chemically synthesized
ucuugguccacucacaauguc

SEQ ID NO: 70359 - RNA, 21 nt, Artificial Sequence
  Chemically synthesized
auugggagcacugaguguagc

SEQ ID NO: 70360 - RNA, 21 nt, Artificial Sequence
  Chemically synthesized
ugaauuucacccucauuccau

SEQ ID NO: 70361 - RNA, 21 nt, Artificial Sequence
  Chemically synthesized
uucaggaaccagagagaccac

SEQ ID NO: 70362 - RNA, 21 nt, Artificial Sequence
  Chemically synthesized
uauacacuugaaaaguguggc

SEQ ID NO: 70363 - RNA, 21 nt, Artificial Sequence
  Chemically synthesized
ucugaagguggcugauuaguu

SEQ ID NO: 70364 - RNA, 21 nt, Artificial Sequence
  Chemically synthesized
uccgaggcauaguagacgacu

SEQ ID NO: 70365 - RNA, 21 nt, Artificial Sequence
  Chemically synthesized
uccugauucucagcuauuucu

SEQ ID NO: 70366 - RNA, 21 nt, Artificial Sequence
  Chemically synthesized
aauuguugcugggcuucaauc

SEQ ID NO: 70367 - RNA, 21 nt, Artificial Sequence
  Chemically synthesized
cuccuuucuucgauauucacc

SEQ ID NO: 70368 - RNA, 21 nt, Artificial Sequence
  Chemically synthesized
uucauaaucccaaagcgcaua

SEQ ID NO: 70369 - RNA, 21 nt, Artificial Sequence
  Chemically synthesized
ucgcacuuaucugcagcaguc

SEQ ID NO: 70370 - RNA, 21 nt, Artificial Sequence
  Chemically synthesized
uacacacuuggacguuguuac

SEQ ID NO: 70371 - RNA, 21 nt, Artificial Sequence
  Chemically synthesized
auuuacaccaaacuguaccag

SEQ ID NO: 70372 - RNA, 21 nt, Artificial Sequence
  Chemically synthesized
uugugaagagccgugaugccu

SEQ ID NO: 70373 - RNA, 21 nt, Artificial Sequence
  Chemically synthesized
uucacccucauuccaugagcg

SEQ ID NO: 70374 - RNA, 21 nt, Artificial Sequence
  Chemically synthesized
uuucuacugggcuuucugagc

SEQ ID NO: 70375 - RNA, 21 nt, Artificial Sequence
  Chemically synthesized
uucguaaggcuucuaggucag

SEQ ID NO: 70376 - RNA, 21 nt, Artificial Sequence
  Chemically synthesized
uggcccucugguaugagucuu

SEQ ID NO: 70377 - RNA, 21 nt, Artificial Sequence
  Chemically synthesized
cugaaggguggaaguaaggug

SEQ ID NO: 70378 - RNA, 21 nt, Artificial Sequence
  Chemically synthesized
aucugcauuugaaggacucca

SEQ ID NO: 70379 - RNA, 21 nt, Artificial Sequence
  Chemically synthesized
auuugaaggacuccaaucagg

SEQ ID NO: 70380 - RNA, 21 nt, Artificial Sequence
  Chemically synthesized
ucucauguugggcagugucug

SEQ ID NO: 70381 - RNA, 21 nt, Artificial Sequence
  Chemically synthesized
auuuccaucagaugaaacugg

SEQ ID NO: 70382 - RNA, 21 nt, Artificial Sequence
  Chemically synthesized
uccaucagaugaaacugguag

SEQ ID NO: 70383 - RNA, 21 nt, Artificial Sequence
  Chemically synthesized
uccuuauagaggcgaucaagc

SEQ ID NO: 70384 - RNA, 21 nt, Artificial Sequence
  Chemically synthesized
uguugcuguugucgcugaucu

SEQ ID NO: 70385 - RNA, 21 nt, Artificial Sequence
  Chemically synthesized
acaucggcaucaucuuggacc

SEQ ID NO: 70386 - RNA, 21 nt, Artificial Sequence
  Chemically synthesized
guucacugacaaccaacuaac

SEQ ID NO: 70387 - RNA, 21 nt, Artificial Sequence
  Chemically synthesized
uuucuggcaggaggacugguu

SEQ ID NO: 70388 - RNA, 21 nt, Artificial Sequence
  Chemically synthesized
ucaccaggaacuuuuacacca

SEQ ID NO: 70389 - RNA, 21 nt, Artificial Sequence
  Chemically synthesized
auucucuucuagagacauucu

SEQ ID NO: 70390 - RNA, 21 nt, Artificial Sequence
  Chemically synthesized
aauucuuggguacagucccag

SEQ ID NO: 70391 - RNA, 21 nt, Artificial Sequence
  Chemically synthesized
uucuuggguacagucccagca

SEQ ID NO: 70392 - RNA, 21 nt, Artificial Sequence
  Chemically synthesized
uguaggucauggcaaacacag

SEQ ID NO: 70393 - RNA, 21 nt, Artificial Sequence
  Chemically synthesized
ugaggcagcacaauguaaugg

SEQ ID NO: 70394 - RNA, 21 nt, Artificial Sequence
  Chemically synthesized
auguaauggaguccauccauc

SEQ ID NO: 70395 - RNA, 21 nt, Artificial Sequence
  Chemically synthesized
aacuguaccaggaacuuaacg

SEQ ID NO: 70396 - RNA, 21 nt, Artificial Sequence
  Chemically synthesized
uccuuuucgggcuccacaugu

SEQ ID NO: 70397 - RNA, 21 nt, Artificial Sequence
  Chemically synthesized
agcugacuuggauggguauga

SEQ ID NO: 70398 - RNA, 21 nt, Artificial Sequence
  Chemically synthesized
aaucguugaagaacaucaaac

SEQ ID NO: 70399 - RNA, 21 nt, Artificial Sequence
  Chemically synthesized
ugguccucugauauaaaagcu

SEQ ID NO: 70400 - RNA, 21 nt, Artificial Sequence
  Chemically synthesized
ugccuggucaguucuucuacu

SEQ ID NO: 70401 - RNA, 21 nt, Artificial Sequence
  Chemically synthesized
uuccuuaguugccagcaauug

SEQ ID NO: 70402 - RNA, 21 nt, Artificial Sequence
  Chemically synthesized
uuuaaacuuggauccugagau

SEQ ID NO: 70403 - RNA, 21 nt, Artificial Sequence
  Chemically synthesized
uugucaugcagucuccuucuu

SEQ ID NO: 70404 - RNA, 21 nt, Artificial Sequence
  Chemically synthesized
ugagguucauaaucccaaagc

SEQ ID NO: 70405 - RNA, 21 nt, Artificial Sequence
  Chemically synthesized
ucccaaagcgcauaaaugacu

SEQ ID NO: 70406 - RNA, 21 nt, Artificial Sequence
  Chemically synthesized
guuacaugaggcagcacaaug

SEQ ID NO: 70407 - RNA, 21 nt, Artificial Sequence
  Chemically synthesized
ucuguacaaggucaaauucuc

SEQ ID NO: 70408 - RNA, 21 nt, Artificial Sequence
  Chemically synthesized
uccaaagacgaaucuagcagu

SEQ ID NO: 70409 - RNA, 21 nt, Artificial Sequence
  Chemically synthesized
uuuucgggcuccacauguaaa

SEQ ID NO: 70410 - RNA, 21 nt, Artificial Sequence
  Chemically synthesized
gcugacuuggauggguaugau

SEQ ID NO: 70411 - RNA, 21 nt, Artificial Sequence
  Chemically synthesized
augaugggacagagauggucu

SEQ ID NO: 70412 - RNA, 21 nt, Artificial Sequence
  Chemically synthesized
uucgcucauuauccgcaacug

SEQ ID NO: 70413 - RNA, 21 nt, Artificial Sequence
  Chemically synthesized
ugguuuuguaggaacaggagg

SEQ ID NO: 70414 - RNA, 21 nt, Artificial Sequence
  Chemically synthesized
uuggacuggucuacugcauca

SEQ ID NO: 70415 - RNA, 21 nt, Artificial Sequence
  Chemically synthesized
auggauuuuagagccuuuagu

SEQ ID NO: 70416 - RNA, 21 nt, Artificial Sequence
  Chemically synthesized
uggcuucaccagcaauucagg

SEQ ID NO: 70417 - RNA, 21 nt, Artificial Sequence
  Chemically synthesized
ucugcauauuguuucuggagu

SEQ ID NO: 70418 - RNA, 21 nt, Artificial Sequence
  Chemically synthesized
agaaacaucggcaucaucuug

SEQ ID NO: 70419 - RNA, 21 nt, Artificial Sequence
  Chemically synthesized
uauucaaacacucccucuguu

SEQ ID NO: 70420 - RNA, 21 nt, Artificial Sequence
  Chemically synthesized
ucuggaguaacuggaacuucu

SEQ ID NO: 70421 - RNA, 21 nt, Artificial Sequence
  Chemically synthesized
ucuucuguuccacguggccuu

SEQ ID NO: 70422 - RNA, 21 nt, Artificial Sequence
  Chemically synthesized
uucucagcuauuucuuuuagc

SEQ ID NO: 70423 - RNA, 21 nt, Artificial Sequence
  Chemically synthesized
ugcuguugucgcugaucuugu

SEQ ID NO: 70424 - RNA, 21 nt, Artificial Sequence
  Chemically synthesized
ucuucgauauucaccaggaac

SEQ ID NO: 70425 - RNA, 21 nt, Artificial Sequence
  Chemically synthesized
ucuguguggaaguuucaggcc

SEQ ID NO: 70426 - RNA, 21 nt, Artificial Sequence
  Chemically synthesized
uguggaaguuucaggccaagc

SEQ ID NO: 70427 - RNA, 21 nt, Artificial Sequence
  Chemically synthesized
guuacguggaacauaucccuc

SEQ ID NO: 70428 - RNA, 21 nt, Artificial Sequence
  Chemically synthesized
aucauucugagguucauaauc

SEQ ID NO: 70429 - RNA, 21 nt, Artificial Sequence
  Chemically synthesized
augcccaucuucuccugaacu

SEQ ID NO: 70430 - RNA, 21 nt, Artificial Sequence
  Chemically synthesized
agaaauugggagcacugagug

SEQ ID NO: 70431 - RNA, 21 nt, Artificial Sequence
  Chemically synthesized
uuuaccaggaggcagagagac

SEQ ID NO: 70432 - RNA, 21 nt, Artificial Sequence
  Chemically synthesized
uucgggcuccacauguaaaua

SEQ ID NO: 70433 - RNA, 21 nt, Artificial Sequence
  Chemically synthesized
auggauucuggauuucuacug

SEQ ID NO: 70434 - RNA, 21 nt, Artificial Sequence
  Chemically synthesized
auuuaguugggcugaguggcc

SEQ ID NO: 70435 - RNA, 21 nt, Artificial Sequence
  Chemically synthesized
ucgcucauuauccgcaacugg

SEQ ID NO: 70436 - RNA, 21 nt, Artificial Sequence
  Chemically synthesized
uuucuugcuuagaaccuggag

SEQ ID NO: 70437 - RNA, 21 nt, Artificial Sequence
  Chemically synthesized
guuuugguuuaguucccaugg

SEQ ID NO: 70438 - RNA, 21 nt, Artificial Sequence
  Chemically synthesized
uuaaugucugaagguggcuga

SEQ ID NO: 70439 - RNA, 21 nt, Artificial Sequence
  Chemically synthesized
uugguuuuguaggaacaggag

SEQ ID NO: 70440 - RNA, 21 nt, Artificial Sequence
  Chemically synthesized
uguaggaacaggaggugguac

SEQ ID NO: 70441 - RNA, 21 nt, Artificial Sequence
  Chemically synthesized
acaggaggugguacuuuagcc

SEQ ID NO: 70442 - RNA, 21 nt, Artificial Sequence
  Chemically synthesized
ucuacugcaucaaacauugag

SEQ ID NO: 70443 - RNA, 21 nt, Artificial Sequence
  Chemically synthesized
uagacgacuggauauagggac

SEQ ID NO: 70444 - RNA, 21 nt, Artificial Sequence
  Chemically synthesized
cuggauauagggaccuacugc

SEQ ID NO: 70445 - RNA, 21 nt, Artificial Sequence
  Chemically synthesized
uggauauagggaccuacugca

SEQ ID NO: 70446 - RNA, 21 nt, Artificial Sequence
  Chemically synthesized
uuguugcugggcuucaaucug

SEQ ID NO: 70447 - RNA, 21 nt, Artificial Sequence
  Chemically synthesized
uaccguagcuuaguuucaaua

SEQ ID NO: 70448 - RNA, 21 nt, Artificial Sequence
  Chemically synthesized
ucacugacaaccaacuaacag

SEQ ID NO: 70449 - RNA, 21 nt, Artificial Sequence
  Chemically synthesized
uacuagacaggauucuuguag

SEQ ID NO: 70450 - RNA, 21 nt, Artificial Sequence
  Chemically synthesized
ugucaugcagucuccuucuuu

SEQ ID NO: 70451 - RNA, 21 nt, Artificial Sequence
  Chemically synthesized
ucaucauucugagguucauaa

SEQ ID NO: 70452 - RNA, 21 nt, Artificial Sequence
  Chemically synthesized
acacuuggacguuguuacaug

SEQ ID NO: 70453 - RNA, 21 nt, Artificial Sequence
  Chemically synthesized
ccaguuuuacgcaaguuuguc

SEQ ID NO: 70454 - RNA, 21 nt, Artificial Sequence
  Chemically synthesized
uccagguacacaucaagcaca

SEQ ID NO: 70455 - RNA, 21 nt, Artificial Sequence
  Chemically synthesized
ucccucaggcucauaaucaag

SEQ ID NO: 70456 - RNA, 21 nt, Artificial Sequence
  Chemically synthesized
uacacgguaagaaacaucggc

SEQ ID NO: 70457 - RNA, 21 nt, Artificial Sequence
  Chemically synthesized
gauggguaugaugggacagag

SEQ ID NO: 70458 - RNA, 21 nt, Artificial Sequence
  Chemically synthesized
aaagcuucugaauauuuggcc

SEQ ID NO: 70459 - RNA, 21 nt, Artificial Sequence
  Chemically synthesized
cugaauauuuggcccauuagg

SEQ ID NO: 70460 - RNA, 21 nt, Artificial Sequence
  Chemically synthesized
uuuugguuuaguucccaugga

SEQ ID NO: 70461 - RNA, 21 nt, Artificial Sequence
  Chemically synthesized
ugguuuaguucccauggacgg

SEQ ID NO: 70462 - RNA, 21 nt, Artificial Sequence
  Chemically synthesized
ucacugcucugguucuuccuc

SEQ ID NO: 70463 - RNA, 21 nt, Artificial Sequence
  Chemically synthesized
ucugcauuugaaggacuccaa

SEQ ID NO: 70464 - RNA, 21 nt, Artificial Sequence
  Chemically synthesized
ugccacuucugaauuacgcuu

SEQ ID NO: 70465 - RNA, 21 nt, Artificial Sequence
  Chemically synthesized
ucagcuauuucuuuuagccuu

SEQ ID NO: 70466 - RNA, 21 nt, Artificial Sequence
  Chemically synthesized
ucuccugcucagcaacuuguu

SEQ ID NO: 70467 - RNA, 21 nt, Artificial Sequence
  Chemically synthesized
uucuggcaggaggacugguuu

SEQ ID NO: 70468 - RNA, 21 nt, Artificial Sequence
  Chemically synthesized
uuaggagcagcugcugaaaac

SEQ ID NO: 70469 - RNA, 21 nt, Artificial Sequence
  Chemically synthesized
uauucaccaggaacuuuuaca

SEQ ID NO: 70470 - RNA, 21 nt, Artificial Sequence
  Chemically synthesized
ucgcuuucaagcuacauuguc

SEQ ID NO: 70471 - RNA, 21 nt, Artificial Sequence
  Chemically synthesized
ucuucgucuucccuguggaug

SEQ ID NO: 70472 - RNA, 21 nt, Artificial Sequence
  Chemically synthesized
uccuucuuucaugggcagcuc

SEQ ID NO: 70473 - RNA, 21 nt, Artificial Sequence
  Chemically synthesized
uccuuuauucauuaugcccau

SEQ ID NO: 70474 - RNA, 21 nt, Artificial Sequence
  Chemically synthesized
uguaauggaguccauccauca

SEQ ID NO: 70475 - RNA, 21 nt, Artificial Sequence
  Chemically synthesized
acgcucugagccaguuuuacg

SEQ ID NO: 70476 - RNA, 21 nt, Artificial Sequence
  Chemically synthesized
acucccucaggcucauaauca

SEQ ID NO: 70477 - RNA, 21 nt, Artificial Sequence
  Chemically synthesized
uuucgggcuccacauguaaau

SEQ ID NO: 70478 - RNA, 21 nt, Artificial Sequence
  Chemically synthesized
uggauucuggauuucuacugg

SEQ ID NO: 70479 - RNA, 21 nt, Artificial Sequence
  Chemically synthesized
cucugguaugagucuugguca

SEQ ID NO: 70480 - RNA, 21 nt, Artificial Sequence
  Chemically synthesized
guuuucugaaggguggaagua

SEQ ID NO: 70481 - RNA, 21 nt, Artificial Sequence
  Chemically synthesized
uucccauggacggaacaacug

SEQ ID NO: 70482 - RNA, 21 nt, Artificial Sequence
  Chemically synthesized
uuuuauuugcaaccugagcau

SEQ ID NO: 70483 - RNA, 21 nt, Artificial Sequence
  Chemically synthesized
auuggacuggucuacugcauc

SEQ ID NO: 70484 - RNA, 21 nt, Artificial Sequence
  Chemically synthesized
acuugauccagagcauuccca

SEQ ID NO: 70485 - RNA, 21 nt, Artificial Sequence
  Chemically synthesized
uaguagacgacuggauauagg

SEQ ID NO: 70486 - RNA, 21 nt, Artificial Sequence
  Chemically synthesized
acugcagacugauugucaugg

SEQ ID NO: 70487 - RNA, 21 nt, Artificial Sequence
  Chemically synthesized
uguugucgcugaucuuguugu

SEQ ID NO: 70488 - RNA, 21 nt, Artificial Sequence
  Chemically synthesized
ucuaauuacugguaccguagc

SEQ ID NO: 70489 - RNA, 21 nt, Artificial Sequence
  Chemically synthesized
uucacugacaauauacaagug

SEQ ID NO: 70490 - RNA, 21 nt, Artificial Sequence
  Chemically synthesized
uauggccugcugacguagaug

SEQ ID NO: 70491 - RNA, 21 nt, Artificial Sequence
  Chemically synthesized
uuggguacagucccagcaagu

SEQ ID NO: 70492 - RNA, 21 nt, Artificial Sequence
  Chemically synthesized
uuuccucgcacuuaucugcag

SEQ ID NO: 70493 - RNA, 21 nt, Artificial Sequence
  Chemically synthesized
aggaagaagcgaacuucguuc

SEQ ID NO: 70494 - RNA, 21 nt, Artificial Sequence
  Chemically synthesized
cagaagcugacuuggaugggu

SEQ ID NO: 70495 - RNA, 21 nt, Artificial Sequence
  Chemically synthesized
aagcuucugaauauuuggccc

SEQ ID NO: 70496 - RNA, 21 nt, Artificial Sequence
  Chemically synthesized
uauuuggcccauuaggacccu

SEQ ID NO: 70497 - RNA, 21 nt, Artificial Sequence
  Chemically synthesized
uacguuucuuuagaggccuug

SEQ ID NO: 70498 - RNA, 21 nt, Artificial Sequence
  Chemically synthesized
uuagaggccuuggugcguuag

SEQ ID NO: 70499 - RNA, 21 nt, Artificial Sequence
  Chemically synthesized
ucagcaucacucugguuucgg

SEQ ID NO: 70500 - RNA, 21 nt, Artificial Sequence
  Chemically synthesized
ugagcaucccgcaagauaucu

SEQ ID NO: 70501 - RNA, 21 nt, Artificial Sequence
  Chemically synthesized
uucacugcucugguucuuccu

SEQ ID NO: 70502 - RNA, 21 nt, Artificial Sequence
  Chemically synthesized
uucucuuucucccucagcgga

SEQ ID NO: 70503 - RNA, 21 nt, Artificial Sequence
  Chemically synthesized
uuguagcuuggcauucugcuc

SEQ ID NO: 70504 - RNA, 21 nt, Artificial Sequence
  Chemically synthesized
gaaacaucggcaucaucuugg

SEQ ID NO: 70505 - RNA, 21 nt, Artificial Sequence
  Chemically synthesized
acuuuugacacagccaggacg

SEQ ID NO: 70506 - RNA, 21 nt, Artificial Sequence
  Chemically synthesized
uuuuagcuuagcuuccugauu

SEQ ID NO: 70507 - RNA, 21 nt, Artificial Sequence
  Chemically synthesized
acuuuaagcgcuguuccuuag

SEQ ID NO: 70508 - RNA, 21 nt, Artificial Sequence
  Chemically synthesized
agucagauccauccuaggacu

SEQ ID NO: 70509 - RNA, 21 nt, Artificial Sequence
  Chemically synthesized
auguccucuaauggugaauuc

SEQ ID NO: 70510 - RNA, 21 nt, Artificial Sequence
  Chemically synthesized
ucuucuagagacauucuucau

SEQ ID NO: 70511 - RNA, 21 nt, Artificial Sequence
  Chemically synthesized
ucuagagacauucuucaucgc

SEQ ID NO: 70512 - RNA, 21 nt, Artificial Sequence
  Chemically synthesized
uagagacauucuucaucgcuu

SEQ ID NO: 70513 - RNA, 21 nt, Artificial Sequence
  Chemically synthesized
uucaggccaagcuccuuuguc

SEQ ID NO: 70514 - RNA, 21 nt, Artificial Sequence
  Chemically synthesized
gguuuaauucuuggguacagu

SEQ ID NO: 70515 - RNA, 21 nt, Artificial Sequence
  Chemically synthesized
ucauaaucccaaagcgcauaa

SEQ ID NO: 70516 - RNA, 21 nt, Artificial Sequence
  Chemically synthesized
uaaucccaaagcgcauaaaug

SEQ ID NO: 70517 - RNA, 21 nt, Artificial Sequence
  Chemically synthesized
ucugcagcagucugcauguca

SEQ ID NO: 70518 - RNA, 21 nt, Artificial Sequence
  Chemically synthesized
aauggaguccauccaucacua

SEQ ID NO: 70519 - RNA, 21 nt, Artificial Sequence
  Chemically synthesized
ucacuaucagcagcauuuaca

SEQ ID NO: 70520 - RNA, 21 nt, Artificial Sequence
  Chemically synthesized
uucguuccucugacuuccaaa

SEQ ID NO: 70521 - RNA, 21 nt, Artificial Sequence
  Chemically synthesized
ucguuuucaugguucuccuga

SEQ ID NO: 70522 - RNA, 21 nt, Artificial Sequence
  Chemically synthesized
uauuugcaaccugagcauccc

SEQ ID NO: 70523 - RNA, 21 nt, Artificial Sequence
  Chemically synthesized
gcucuugauucaauuuguuuc

SEQ ID NO: 70524 - RNA, 21 nt, Artificial Sequence
  Chemically synthesized
cuuagcugcagcuccuuauag

SEQ ID NO: 70525 - RNA, 21 nt, Artificial Sequence
  Chemically synthesized
auuuccuccacaaguuuccca

SEQ ID NO: 70526 - RNA, 21 nt, Artificial Sequence
  Chemically synthesized
aacuuuaagcgcuguuccuua

SEQ ID NO: 70527 - RNA, 21 nt, Artificial Sequence
  Chemically synthesized
cuauuaacaccguucuccuuu

SEQ ID NO: 70528 - RNA, 21 nt, Artificial Sequence
  Chemically synthesized
cuguuuuuaaagucagcuaug

SEQ ID NO: 70529 - RNA, 21 nt, Artificial Sequence
  Chemically synthesized
aguucuucacugacaauauac

SEQ ID NO: 70530 - RNA, 21 nt, Artificial Sequence
  Chemically synthesized
augugacggcacugguccuuu

SEQ ID NO: 70531 - RNA, 21 nt, Artificial Sequence
  Chemically synthesized
aacaggacagagagcugauuu

SEQ ID NO: 70532 - RNA, 21 nt, Artificial Sequence
  Chemically synthesized
uguggaugauugucaugcagu

SEQ ID NO: 70533 - RNA, 21 nt, Artificial Sequence
  Chemically synthesized
ugcccaucuucuccugaacuc

SEQ ID NO: 70534 - RNA, 21 nt, Artificial Sequence
  Chemically synthesized
uccugaacuccauaaagaaau

SEQ ID NO: 70535 - RNA, 21 nt, Artificial Sequence
  Chemically synthesized
uacuccuccagguacacauca

SEQ ID NO: 70536 - RNA, 21 nt, Artificial Sequence
  Chemically synthesized
ugguucuucuggguuauucug

SEQ ID NO: 70537 - RNA, 21 nt, Artificial Sequence
  Chemically synthesized
ucuggagauuugggcuguugu

SEQ ID NO: 70538 - RNA, 21 nt, Artificial Sequence
  Chemically synthesized
cacagaagcugacuuggaugg

SEQ ID NO: 70539 - RNA, 21 nt, Artificial Sequence
  Chemically synthesized
uauggugguccucugauauaa

SEQ ID NO: 70540 - RNA, 21 nt, Artificial Sequence
  Chemically synthesized
uugaagaacaucaaacauucg

SEQ ID NO: 70541 - RNA, 21 nt, Artificial Sequence
  Chemically synthesized
auucgcucauuauccgcaacu

SEQ ID NO: 70542 - RNA, 21 nt, Artificial Sequence
  Chemically synthesized
cuugaaaaguguggcccucug

SEQ ID NO: 70543 - RNA, 21 nt, Artificial Sequence
  Chemically synthesized
ugcugguuuugguuuaguucc

SEQ ID NO: 70544 - RNA, 21 nt, Artificial Sequence
  Chemically synthesized
ucccgcaagauaucuucacug

SEQ ID NO: 70545 - RNA, 21 nt, Artificial Sequence
  Chemically synthesized
uuccuccacaaguuucccauu

SEQ ID NO: 70546 - RNA, 21 nt, Artificial Sequence
  Chemically synthesized
uucuuguagaaaacaggauug

SEQ ID NO: 70547 - RNA, 21 nt, Artificial Sequence
  Chemically synthesized
cuccuuugucuugguuuaauu

SEQ ID NO: 70548 - RNA, 21 nt, Artificial Sequence
  Chemically synthesized
uucccuguggaugauugucau

SEQ ID NO: 70549 - RNA, 21 nt, Artificial Sequence
  Chemically synthesized
uaucugcagcagucugcaugu

SEQ ID NO: 70550 - RNA, 21 nt, Artificial Sequence
  Chemically synthesized
uuacaugaggcagcacaaugu

SEQ ID NO: 70551 - RNA, 21 nt, Artificial Sequence
  Chemically synthesized
uugguucuucuggguuauucu

SEQ ID NO: 70552 - RNA, 21 nt, Artificial Sequence
  Chemically synthesized
ucaggcucauaaucaaggccu

SEQ ID NO: 70553 - RNA, 21 nt, Artificial Sequence
  Chemically synthesized
ucacuguucucuguacuggca

SEQ ID NO: 70554 - RNA, 21 nt, Artificial Sequence
  Chemically synthesized
acauguaaauauggauucugg

SEQ ID NO: 70555 - RNA, 21 nt, Artificial Sequence
  Chemically synthesized
uuuuuccuggcgccugcuguu

SEQ ID NO: 70556 - RNA, 21 nt, Artificial Sequence
  Chemically synthesized
auugaacuugcugccacgguc

SEQ ID NO: 70557 - RNA, 21 nt, Artificial Sequence
  Chemically synthesized
aacaggaggugguacuuuagc

SEQ ID NO: 70558 - RNA, 21 nt, Artificial Sequence
  Chemically synthesized
uugauccagagcauucccagu

SEQ ID NO: 70559 - RNA, 21 nt, Artificial Sequence
  Chemically synthesized
auuguuucuggaguaacugga

SEQ ID NO: 70560 - RNA, 21 nt, Artificial Sequence
  Chemically synthesized
acuggaacuucugugaagugc

SEQ ID NO: 70561 - RNA, 21 nt, Artificial Sequence
  Chemically synthesized
ucaguucuucuacuuuugaca

SEQ ID NO: 70562 - RNA, 21 nt, Artificial Sequence
  Chemically synthesized
ucccucuguuuuugcuggaac

SEQ ID NO: 70563 - RNA, 21 nt, Artificial Sequence
  Chemically synthesized
auuguugcugggcuucaaucu

SEQ ID NO: 70564 - RNA, 21 nt, Artificial Sequence
  Chemically synthesized
uucagcaagagucagauccau

SEQ ID NO: 70565 - RNA, 21 nt, Artificial Sequence
  Chemically synthesized
uuguucacugacaaccaacua

SEQ ID NO: 70566 - RNA, 21 nt, Artificial Sequence
  Chemically synthesized
uauacuuaucugagugcuaca

SEQ ID NO: 70567 - RNA, 21 nt, Artificial Sequence
  Chemically synthesized
ucaauccuucauucucuucua

SEQ ID NO: 70568 - RNA, 21 nt, Artificial Sequence
  Chemically synthesized
agucuugugaaauuuuugcca

SEQ ID NO: 70569 - RNA, 21 nt, Artificial Sequence
  Chemically synthesized
ugagauacacgguaagaaaca

SEQ ID NO: 70570 - RNA, 21 nt, Artificial Sequence
  Chemically synthesized
aucacuaucagcagcauuuac

SEQ ID NO: 70571 - RNA, 21 nt, Artificial Sequence
  Chemically synthesized
uuuguccuuuuaccaggaggc

SEQ ID NO: 70572 - RNA, 21 nt, Artificial Sequence
  Chemically synthesized
uggagauuugggcuguugucu

SEQ ID NO: 70573 - RNA, 21 nt, Artificial Sequence
  Chemically synthesized
uuuagaggccuuggugcguua

SEQ ID NO: 70574 - RNA, 21 nt, Artificial Sequence
  Chemically synthesized
uugauucugggcagcagcaau

SEQ ID NO: 70575 - RNA, 21 nt, Artificial Sequence
  Chemically synthesized
ucugggcagcagcaauuacag

SEQ ID NO: 70576 - RNA, 21 nt, Artificial Sequence
  Chemically synthesized
ucuugcuuagaaccuggagaa

SEQ ID NO: 70577 - RNA, 21 nt, Artificial Sequence
  Chemically synthesized
agcggaaccucuccaucauca

SEQ ID NO: 70578 - RNA, 21 nt, Artificial Sequence
  Chemically synthesized
uccaucaucaacuugauccag

SEQ ID NO: 70579 - RNA, 21 nt, Artificial Sequence
  Chemically synthesized
ugggcagugucuguauuuuca

SEQ ID NO: 70580 - RNA, 21 nt, Artificial Sequence
  Chemically synthesized
uugcuguagagcugccuucuu

SEQ ID NO: 70581 - RNA, 21 nt, Artificial Sequence
  Chemically synthesized
uacuuuugacacagccaggac

SEQ ID NO: 70582 - RNA, 21 nt, Artificial Sequence
  Chemically synthesized
aagugcucucacuuuuuuuag

SEQ ID NO: 70583 - RNA, 21 nt, Artificial Sequence
  Chemically synthesized
uuguugcuguugucgcugauc

SEQ ID NO: 70584 - RNA, 21 nt, Artificial Sequence
  Chemically synthesized
uuuaagcgcuguuccuuaguu

SEQ ID NO: 70585 - RNA, 21 nt, Artificial Sequence
  Chemically synthesized
uucaaucuguugcugcuggcg

SEQ ID NO: 70586 - RNA, 21 nt, Artificial Sequence
  Chemically synthesized
ugguuuaggagcagcugcuga

SEQ ID NO: 70587 - RNA, 21 nt, Artificial Sequence
  Chemically synthesized
uucucuucuagagacauucuu

SEQ ID NO: 70588 - RNA, 21 nt, Artificial Sequence
  Chemically synthesized
augauugucaugcagucuccu

SEQ ID NO: 70589 - RNA, 21 nt, Artificial Sequence
  Chemically synthesized
uccugagaucuugguccacuc

SEQ ID NO: 70590 - RNA, 21 nt, Artificial Sequence
  Chemically synthesized
auucucuguacaaggucaaau

SEQ ID NO: 70591 - RNA, 21 nt, Artificial Sequence
  Chemically synthesized
acaggcuuaccauauacacuu

SEQ ID NO: 70592 - RNA, 21 nt, Artificial Sequence
  Chemically synthesized
augagucuuggucaacgcgcu

SEQ ID NO: 70593 - RNA, 21 nt, Artificial Sequence
  Chemically synthesized
uggcuuaaugucugaaggugg

SEQ ID NO: 70594 - RNA, 21 nt, Artificial Sequence
  Chemically synthesized
auucccagugcuuugagguac

SEQ ID NO: 70595 - RNA, 21 nt, Artificial Sequence
  Chemically synthesized
uacagaagcagagccuuggcu

SEQ ID NO: 70596 - RNA, 21 nt, Artificial Sequence
  Chemically synthesized
auuuucuuuuugcuguagagc

SEQ ID NO: 70597 - RNA, 21 nt, Artificial Sequence
  Chemically synthesized
uccaugacugccacuucugaa

SEQ ID NO: 70598 - RNA, 21 nt, Artificial Sequence
  Chemically synthesized
ucaaacacucccucuguuguu

SEQ ID NO: 70599 - RNA, 21 nt, Artificial Sequence
  Chemically synthesized
uagcuuggcauucugcucuug

SEQ ID NO: 70600 - RNA, 21 nt, Artificial Sequence
  Chemically synthesized
uccacguggccuuuaagugcu

SEQ ID NO: 70601 - RNA, 21 nt, Artificial Sequence
  Chemically synthesized
uuauuguucacugacaaccaa

SEQ ID NO: 70602 - RNA, 21 nt, Artificial Sequence
  Chemically synthesized
ucuucacugacaauauacaag

SEQ ID NO: 70603 - RNA, 21 nt, Artificial Sequence
  Chemically synthesized
agcugauuucccaacugccca

SEQ ID NO: 70604 - RNA, 21 nt, Artificial Sequence
  Chemically synthesized
uaucugagugcuacacgggac

SEQ ID NO: 70605 - RNA, 21 nt, Artificial Sequence
  Chemically synthesized
aucgcuuucaagcuacauugu

SEQ ID NO: 70606 - RNA, 21 nt, Artificial Sequence
  Chemically synthesized
uucugagguucauaaucccaa

SEQ ID NO: 70607 - RNA, 21 nt, Artificial Sequence
  Chemically synthesized
ucugagguucauaaucccaaa

SEQ ID NO: 70608 - RNA, 21 nt, Artificial Sequence
  Chemically synthesized
cccaaagcgcauaaaugacuc

SEQ ID NO: 70609 - RNA, 21 nt, Artificial Sequence
  Chemically synthesized
ucagcagcauuuacauuuaca

SEQ ID NO: 70610 - RNA, 21 nt, Artificial Sequence
  Chemically synthesized
auuccaugagcgauacgcucu

SEQ ID NO: 70611 - RNA, 21 nt, Artificial Sequence
  Chemically synthesized
uacacaucaagcacaugugga

SEQ ID NO: 70612 - RNA, 21 nt, Artificial Sequence
  Chemically synthesized
uccacauguaaauauggauuc

SEQ ID NO: 70613 - RNA, 21 nt, Artificial Sequence
  Chemically synthesized
auauggauucuggauuucuac

SEQ ID NO: 70614 - RNA, 21 nt, Artificial Sequence
  Chemically synthesized
uaugaugggacagagaugguc

SEQ ID NO: 70615 - RNA, 21 nt, Artificial Sequence
  Chemically synthesized
gugcguuagacaguuucuuuc

SEQ ID NO: 70616 - RNA, 21 nt, Artificial Sequence
  Chemically synthesized
ucauuauccgcaacuggacgu

SEQ ID NO: 70617 - RNA, 21 nt, Artificial Sequence
  Chemically synthesized
auacacuugaaaaguguggcc

SEQ ID NO: 70618 - RNA, 21 nt, Artificial Sequence
  Chemically synthesized
agccugcuggaaguuuuuucc

SEQ ID NO: 70619 - RNA, 21 nt, Artificial Sequence
  Chemically synthesized
ccugcuguugcguauacaugg

SEQ ID NO: 70620 - RNA, 21 nt, Artificial Sequence
  Chemically synthesized
uuggccaaccgaagguaugcu

SEQ ID NO: 70621 - RNA, 21 nt, Artificial Sequence
  Chemically synthesized
ucagaguaccaaaggaaggug

SEQ ID NO: 70622 - RNA, 21 nt, Artificial Sequence
  Chemically synthesized
gguucuuugcacagauccacc

SEQ ID NO: 70623 - RNA, 21 nt, Artificial Sequence
  Chemically synthesized
ugguagauuuucuuuuugcug

SEQ ID NO: 70624 - RNA, 21 nt, Artificial Sequence
  Chemically synthesized
ucucagcuauuucuuuuagcc

SEQ ID NO: 70625 - RNA, 21 nt, Artificial Sequence
  Chemically synthesized
ucaaucuguugcugcuggcga

SEQ ID NO: 70626 - RNA, 21 nt, Artificial Sequence
  Chemically synthesized
ugccauuuccugaaguucagc

SEQ ID NO: 70627 - RNA, 21 nt, Artificial Sequence
  Chemically synthesized
uaagucuguagcaaguuucua

SEQ ID NO: 70628 - RNA, 21 nt, Artificial Sequence
  Chemically synthesized
acagauuaaaauucagccuac

SEQ ID NO: 70629 - RNA, 21 nt, Artificial Sequence
  Chemically synthesized
guuauuguucacugacaacca

SEQ ID NO: 70630 - RNA, 21 nt, Artificial Sequence
  Chemically synthesized
aaucagagacagcgaugugac

SEQ ID NO: 70631 - RNA, 21 nt, Artificial Sequence
  Chemically synthesized
ucgauauucaccaggaacuuu

SEQ ID NO: 70632 - RNA, 21 nt, Artificial Sequence
  Chemically synthesized
ucuuggguacagucccagcaa

SEQ ID NO: 70633 - RNA, 21 nt, Artificial Sequence
  Chemically synthesized
cuucccuguggaugauuguca

SEQ ID NO: 70634 - RNA, 21 nt, Artificial Sequence
  Chemically synthesized
acaauguaauggaguccaucc

SEQ ID NO: 70635 - RNA, 21 nt, Artificial Sequence
  Chemically synthesized
auuuggcccauuaggacccuc

SEQ ID NO: 70636 - RNA, 21 nt, Artificial Sequence
  Chemically synthesized
guugaagaacaucaaacauuc

SEQ ID NO: 70637 - RNA, 21 nt, Artificial Sequence
  Chemically synthesized
uggacggaacaacuguugaca

SEQ ID NO: 70638 - RNA, 21 nt, Artificial Sequence
  Chemically synthesized
augucugaagguggcugauua

SEQ ID NO: 70639 - RNA, 21 nt, Artificial Sequence
  Chemically synthesized
uucagccaaauggcaaucacu

SEQ ID NO: 70640 - RNA, 21 nt, Artificial Sequence
  Chemically synthesized
ucugguucuuccucagaguac

SEQ ID NO: 70641 - RNA, 21 nt, Artificial Sequence
  Chemically synthesized
uugaaggacuccaaucagggc

SEQ ID NO: 70642 - RNA, 21 nt, Artificial Sequence
  Chemically synthesized
aaugaccaaggaaccauccgg

SEQ ID NO: 70643 - RNA, 21 nt, Artificial Sequence
  Chemically synthesized
acugguagauuuucuuuuugc

SEQ ID NO: 70644 - RNA, 21 nt, Artificial Sequence
  Chemically synthesized
ucagcaacuuguugcuguugu

SEQ ID NO: 70645 - RNA, 21 nt, Artificial Sequence
  Chemically synthesized
guugccagcaauuguugcugg

SEQ ID NO: 70646 - RNA, 21 nt, Artificial Sequence
  Chemically synthesized
uaggacuauuaacaccguucu

SEQ ID NO: 70647 - RNA, 21 nt, Artificial Sequence
  Chemically synthesized
ugcugaaaacacucaacagga

SEQ ID NO: 70648 - RNA, 21 nt, Artificial Sequence
  Chemically synthesized
uuaucugagugcuacacggga

SEQ ID NO: 70649 - RNA, 21 nt, Artificial Sequence
  Chemically synthesized
agaugcuuuauuucaucacgc

SEQ ID NO: 70650 - RNA, 21 nt, Artificial Sequence
  Chemically synthesized
uccucuaauggugaauucuuc

SEQ ID NO: 70651 - RNA, 21 nt, Artificial Sequence
  Chemically synthesized
uggaacauaucccuccuuauc

SEQ ID NO: 70652 - RNA, 21 nt, Artificial Sequence
  Chemically synthesized
aucaucauucugagguucaua

SEQ ID NO: 70653 - RNA, 21 nt, Artificial Sequence
  Chemically synthesized
ugaacuccauaaagaaauugg

SEQ ID NO: 70654 - RNA, 21 nt, Artificial Sequence
  Chemically synthesized
cuccauuuccucgcacuuauc

SEQ ID NO: 70655 - RNA, 23 nt, Artificial Sequence
  Chemically synthesized
cuauaaggagcugcagcuaagaa

SEQ ID NO: 70656 - RNA, 23 nt, Artificial Sequence
  Chemically synthesized
cguaguucuauuacagagccaga

SEQ ID NO: 70657 - RNA, 23 nt, Artificial Sequence
  Chemically synthesized
cagaauaacccagaagaaccaaa

SEQ ID NO: 70658 - RNA, 23 nt, Artificial Sequence
  Chemically synthesized
gaacguccaguugcggauaauga

SEQ ID NO: 70659 - RNA, 23 nt, Artificial Sequence
  Chemically synthesized
cguguagcacucagauaaguaua

SEQ ID NO: 70660 - RNA, 23 nt, Artificial Sequence
  Chemically synthesized
cagagaauuauuuaugagguuga

SEQ ID NO: 70661 - RNA, 23 nt, Artificial Sequence
  Chemically synthesized
caauauauuccauguauacgcaa

SEQ ID NO: 70662 - RNA, 23 nt, Artificial Sequence
  Chemically synthesized
caaacuugcguaaaacuggcuca

SEQ ID NO: 70663 - RNA, 23 nt, Artificial Sequence
  Chemically synthesized
guaccaccuccuguuccuacaaa

SEQ ID NO: 70664 - RNA, 23 nt, Artificial Sequence
  Chemically synthesized
ccauauuuacauguggagcccga

SEQ ID NO: 70665 - RNA, 23 nt, Artificial Sequence
  Chemically synthesized
ccuguaauugcugcugcccagaa

SEQ ID NO: 70666 - RNA, 23 nt, Artificial Sequence
  Chemically synthesized
gggccacacuuuucaaguguaua

SEQ ID NO: 70667 - RNA, 23 nt, Artificial Sequence
  Chemically synthesized
caaacuaaucagccaccuucaga

SEQ ID NO: 70668 - RNA, 23 nt, Artificial Sequence
  Chemically synthesized
gaagaacugaccaggcagcuaga

SEQ ID NO: 70669 - RNA, 23 nt, Artificial Sequence
  Chemically synthesized
ccauuagaggacauuuagcguga

SEQ ID NO: 70670 - RNA, 23 nt, Artificial Sequence
  Chemically synthesized
ccaccuucagacauuaagccaga

SEQ ID NO: 70671 - RNA, 23 nt, Artificial Sequence
  Chemically synthesized
ugguaaaaggacaaacuugcgua

SEQ ID NO: 70672 - RNA, 23 nt, Artificial Sequence
  Chemically synthesized
caacagcaggcgccaggaaaaaa

SEQ ID NO: 70673 - RNA, 23 nt, Artificial Sequence
  Chemically synthesized
cacuuuucaaguguauaugguaa

SEQ ID NO: 70674 - RNA, 23 nt, Artificial Sequence
  Chemically synthesized
ccucuauaaggagcugcagcuaa

SEQ ID NO: 70675 - RNA, 23 nt, Artificial Sequence
  Chemically synthesized
gauaagugcgaggaaauggagga

SEQ ID NO: 70676 - RNA, 23 nt, Artificial Sequence
  Chemically synthesized
cguaaaacuggcucagagcguau

SEQ ID NO: 70677 - RNA, 23 nt, Artificial Sequence
  Chemically synthesized
caaagaacccggcgagagugauu

SEQ ID NO: 70678 - RNA, 23 nt, Artificial Sequence
  Chemically synthesized
agaaguuccaguuacuccagaaa

SEQ ID NO: 70679 - RNA, 23 nt, Artificial Sequence
  Chemically synthesized
gcuagagaugcucaagaacggca

SEQ ID NO: 70680 - RNA, 23 nt, Artificial Sequence
  Chemically synthesized
gcaugacaaucauccacagggaa

SEQ ID NO: 70681 - RNA, 23 nt, Artificial Sequence
  Chemically synthesized
cagcaacaaguugcugagcagga

SEQ ID NO: 70682 - RNA, 23 nt, Artificial Sequence
  Chemically synthesized
guguuuucagcagcugcuccuaa

SEQ ID NO: 70683 - RNA, 23 nt, Artificial Sequence
  Chemically synthesized
gaaguaauacgauuauuuuuggc

SEQ ID NO: 70684 - RNA, 23 nt, Artificial Sequence
  Chemically synthesized
gucuaacgcaccaaggccucuaa

SEQ ID NO: 70685 - RNA, 23 nt, Artificial Sequence
  Chemically synthesized
gagagugauugccauuuggcuga

SEQ ID NO: 70686 - RNA, 23 nt, Artificial Sequence
  Chemically synthesized
agaacugaccaggcagcuagaga

SEQ ID NO: 70687 - RNA, 23 nt, Artificial Sequence
  Chemically synthesized
aagaaauagcugagaaucaggaa

SEQ ID NO: 70688 - RNA, 23 nt, Artificial Sequence
  Chemically synthesized
gagcuuggccugaaacuuccaca

SEQ ID NO: 70689 - RNA, 23 nt, Artificial Sequence
  Chemically synthesized
gcuucacaaacuaaaggcucuaa

SEQ ID NO: 70690 - RNA, 23 nt, Artificial Sequence
  Chemically synthesized
ccggaugguuccuuggucauuca

SEQ ID NO: 70691 - RNA, 23 nt, Artificial Sequence
  Chemically synthesized
aaagaaauagcugagaaucagga

SEQ ID NO: 70692 - RNA, 23 nt, Artificial Sequence
  Chemically synthesized
guagaaucuuguuuguaggcuga

SEQ ID NO: 70693 - RNA, 23 nt, Artificial Sequence
  Chemically synthesized
uaaaccaguccuccugccagaaa

SEQ ID NO: 70694 - RNA, 23 nt, Artificial Sequence
  Chemically synthesized
ucauuuauugggcaguugggaaa

SEQ ID NO: 70695 - RNA, 23 nt, Artificial Sequence
  Chemically synthesized
caacagcagcacccagagaacau

SEQ ID NO: 70696 - RNA, 23 nt, Artificial Sequence
  Chemically synthesized
ggccacacuuuucaaguguauau

SEQ ID NO: 70697 - RNA, 23 nt, Artificial Sequence
  Chemically synthesized
ugaugauggagagguuccgcuga

SEQ ID NO: 70698 - RNA, 23 nt, Artificial Sequence
  Chemically synthesized
cagacugcugcagauaagugcga

SEQ ID NO: 70699 - RNA, 23 nt, Artificial Sequence
  Chemically synthesized
cauauuuacauguggagcccgaa

SEQ ID NO: 70700 - RNA, 23 nt, Artificial Sequence
  Chemically synthesized
ccuguuucuucaguucaggagaa

SEQ ID NO: 70701 - RNA, 23 nt, Artificial Sequence
  Chemically synthesized
aaucaacagcagcacccagagaa

SEQ ID NO: 70702 - RNA, 23 nt, Artificial Sequence
  Chemically synthesized
uacuaugccucggaugcccucaa

SEQ ID NO: 70703 - RNA, 23 nt, Artificial Sequence
  Chemically synthesized
cuccauuacauugugcugccuca

SEQ ID NO: 70704 - RNA, 23 nt, Artificial Sequence
  Chemically synthesized
agaauaacccagaagaaccaaau

SEQ ID NO: 70705 - RNA, 23 nt, Artificial Sequence
  Chemically synthesized
cauccaagucagcuucugugacu

SEQ ID NO: 70706 - RNA, 23 nt, Artificial Sequence
  Chemically synthesized
gcgcuuugggauuaugaaccuca

SEQ ID NO: 70707 - RNA, 23 nt, Artificial Sequence
  Chemically synthesized
gacucuugcugaacuucaggaaa

SEQ ID NO: 70708 - RNA, 23 nt, Artificial Sequence
  Chemically synthesized
cuuuauggaguucaggagaagau

SEQ ID NO: 70709 - RNA, 23 nt, Artificial Sequence
  Chemically synthesized
gaaagcccaguagaaauccagaa

SEQ ID NO: 70710 - RNA, 23 nt, Artificial Sequence
  Chemically synthesized
gaaagaauuccucggccacucag

SEQ ID NO: 70711 - RNA, 23 nt, Artificial Sequence
  Chemically synthesized
auuuauuccaauagccagggcaa

SEQ ID NO: 70712 - RNA, 23 nt, Artificial Sequence
  Chemically synthesized
cagaaguuccaguuacuccagaa

SEQ ID NO: 70713 - RNA, 23 nt, Artificial Sequence
  Chemically synthesized
caacaagaucagcgacaacagca

SEQ ID NO: 70714 - RNA, 23 nt, Artificial Sequence
  Chemically synthesized
gaucauuuauugggcaguuggga

SEQ ID NO: 70715 - RNA, 23 nt, Artificial Sequence
  Chemically synthesized
cuugaaagcgaugaagaaugucu

SEQ ID NO: 70716 - RNA, 23 nt, Artificial Sequence
  Chemically synthesized
ggaguucaggagaagaugggcau

SEQ ID NO: 70717 - RNA, 23 nt, Artificial Sequence
  Chemically synthesized
ccaaaucuccagaauaacccaga

SEQ ID NO: 70718 - RNA, 23 nt, Artificial Sequence
  Chemically synthesized
aguuguuccguccaugggaacua

SEQ ID NO: 70719 - RNA, 23 nt, Artificial Sequence
  Chemically synthesized
gacaaacuaaucagccaccuuca

SEQ ID NO: 70720 - RNA, 23 nt, Artificial Sequence
  Chemically synthesized
acaauaugcagagacguggugga

SEQ ID NO: 70721 - RNA, 23 nt, Artificial Sequence
  Chemically synthesized
gcuaagaaacaaauugaaucaag

SEQ ID NO: 70722 - RNA, 23 nt, Artificial Sequence
  Chemically synthesized
cuguuaagaagaaguaauacgau

SEQ ID NO: 70723 - RNA, 23 nt, Artificial Sequence
  Chemically synthesized
caaguguauaugguaagccugua

SEQ ID NO: 70724 - RNA, 23 nt, Artificial Sequence
  Chemically synthesized
guuugaugcaguagaccagucca

SEQ ID NO: 70725 - RNA, 23 nt, Artificial Sequence
  Chemically synthesized
caaggcucugcuucuguaccuca

SEQ ID NO: 70726 - RNA, 23 nt, Artificial Sequence
  Chemically synthesized
acagaaguuccaguuacuccaga

SEQ ID NO: 70727 - RNA, 23 nt, Artificial Sequence
  Chemically synthesized
ggcaacuaaggaacagcgcuuaa

SEQ ID NO: 70728 - RNA, 23 nt, Artificial Sequence
  Chemically synthesized
ucagcagcugcuccuaaaccagu

SEQ ID NO: 70729 - RNA, 23 nt, Artificial Sequence
  Chemically synthesized
gcuccuucuccaggccuugauua

SEQ ID NO: 70730 - RNA, 23 nt, Artificial Sequence
  Chemically synthesized
gccuguuucuucaguucaggaga

SEQ ID NO: 70731 - RNA, 23 nt, Artificial Sequence
  Chemically synthesized
aacaguuguuccguccaugggaa

SEQ ID NO: 70732 - RNA, 23 nt, Artificial Sequence
  Chemically synthesized
cagacauuaagccagacggaagu

SEQ ID NO: 70733 - RNA, 23 nt, Artificial Sequence
  Chemically synthesized
gacaaucagucugcaguggcuga

SEQ ID NO: 70734 - RNA, 23 nt, Artificial Sequence
  Chemically synthesized
caguaauuagauguagaaucuug

SEQ ID NO: 70735 - RNA, 23 nt, Artificial Sequence
  Chemically synthesized
ccgucacaucgcugucucugauu

SEQ ID NO: 70736 - RNA, 23 nt, Artificial Sequence
  Chemically synthesized
guuucuuaccguguaucucagua

SEQ ID NO: 70737 - RNA, 23 nt, Artificial Sequence
  Chemically synthesized
gaagcuuuuauaucagaggacca

SEQ ID NO: 70738 - RNA, 23 nt, Artificial Sequence
  Chemically synthesized
gaugaaaauacagacacugccca

SEQ ID NO: 70739 - RNA, 23 nt, Artificial Sequence
  Chemically synthesized
uguuugaauaagcguaauucaga

SEQ ID NO: 70740 - RNA, 23 nt, Artificial Sequence
  Chemically synthesized
aaauggcaucucgccagcagcaa

SEQ ID NO: 70741 - RNA, 23 nt, Artificial Sequence
  Chemically synthesized
aagcuacgguaccaguaauuaga

SEQ ID NO: 70742 - RNA, 23 nt, Artificial Sequence
  Chemically synthesized
gcuuugggauuaugaaccucaga

SEQ ID NO: 70743 - RNA, 23 nt, Artificial Sequence
  Chemically synthesized
cguuaaguuccugguacaguuug

SEQ ID NO: 70744 - RNA, 23 nt, Artificial Sequence
  Chemically synthesized
gaugaaggcaucacggcucuuca

SEQ ID NO: 70745 - RNA, 23 nt, Artificial Sequence
  Chemically synthesized
cuuucuuaucuaauccuuaccga

SEQ ID NO: 70746 - RNA, 23 nt, Artificial Sequence
  Chemically synthesized
gagggccacacuuuucaagugua

SEQ ID NO: 70747 - RNA, 23 nt, Artificial Sequence
  Chemically synthesized
aagacucauaccagagggccaca

SEQ ID NO: 70748 - RNA, 23 nt, Artificial Sequence
  Chemically synthesized
guuguuccguccaugggaacuaa

SEQ ID NO: 70749 - RNA, 23 nt, Artificial Sequence
  Chemically synthesized
cuggcaacuaaggaacagcgcuu

SEQ ID NO: 70750 - RNA, 23 nt, Artificial Sequence
  Chemically synthesized
cauagcugacuuuaaaaacaguu

SEQ ID NO: 70751 - RNA, 23 nt, Artificial Sequence
  Chemically synthesized
cugcugcagauaagugcgaggaa

SEQ ID NO: 70752 - RNA, 23 nt, Artificial Sequence
  Chemically synthesized
gugugugcaggccacacagaaau

SEQ ID NO: 70753 - RNA, 23 nt, Artificial Sequence
  Chemically synthesized
aaucagccaccuucagacauuaa

SEQ ID NO: 70754 - RNA, 23 nt, Artificial Sequence
  Chemically synthesized
caauaugcagagacgugguggau

SEQ ID NO: 70755 - RNA, 23 nt, Artificial Sequence
  Chemically synthesized
ccuauauccagucgucuacuaug

SEQ ID NO: 70756 - RNA, 23 nt, Artificial Sequence
  Chemically synthesized
agcaaugggaaacuuguggagga

SEQ ID NO: 70757 - RNA, 23 nt, Artificial Sequence
  Chemically synthesized
agagcacuuaaaggccacgugga

SEQ ID NO: 70758 - RNA, 23 nt, Artificial Sequence
  Chemically synthesized
cauuuauugggcaguugggaaau

SEQ ID NO: 70759 - RNA, 23 nt, Artificial Sequence
  Chemically synthesized
aucauuuauugggcaguugggaa

SEQ ID NO: 70760 - RNA, 23 nt, Artificial Sequence
  Chemically synthesized
cagaaugaugaugagcugcccau

SEQ ID NO: 70761 - RNA, 23 nt, Artificial Sequence
  Chemically synthesized
ucuuuauggaguucaggagaaga

SEQ ID NO: 70762 - RNA, 23 nt, Artificial Sequence
  Chemically synthesized
cuguaauugcugcugcccagaau

SEQ ID NO: 70763 - RNA, 23 nt, Artificial Sequence
  Chemically synthesized
ugguacucugaggaagaaccaga

SEQ ID NO: 70764 - RNA, 23 nt, Artificial Sequence
  Chemically synthesized
cguaauauuugucaagaucauag

SEQ ID NO: 70765 - RNA, 23 nt, Artificial Sequence
  Chemically synthesized
uguuuucagcagcugcuccuaaa

SEQ ID NO: 70766 - RNA, 23 nt, Artificial Sequence
  Chemically synthesized
aauuaaaccaagacaaaggagcu

SEQ ID NO: 70767 - RNA, 23 nt, Artificial Sequence
  Chemically synthesized
acuugcugggacuguacccaaga

SEQ ID NO: 70768 - RNA, 23 nt, Artificial Sequence
  Chemically synthesized
uaacuugcugggacuguacccaa

SEQ ID NO: 70769 - RNA, 23 nt, Artificial Sequence
  Chemically synthesized
cagaauccauauuuacaugugga

SEQ ID NO: 70770 - RNA, 23 nt, Artificial Sequence
  Chemically synthesized
guaauugcugcugcccagaauca

SEQ ID NO: 70771 - RNA, 23 nt, Artificial Sequence
  Chemically synthesized
ggaaaaaacuuccagcaggcugu

SEQ ID NO: 70772 - RNA, 23 nt, Artificial Sequence
  Chemically synthesized
cagccuuccaaagacaccuuacu

SEQ ID NO: 70773 - RNA, 23 nt, Artificial Sequence
  Chemically synthesized
uugaaucaagagcagaaugccaa

SEQ ID NO: 70774 - RNA, 23 nt, Artificial Sequence
  Chemically synthesized
gcucucuguccuguugaguguuu

SEQ ID NO: 70775 - RNA, 23 nt, Artificial Sequence
  Chemically synthesized
aaaucagcucucuguccuguuga

SEQ ID NO: 70776 - RNA, 23 nt, Artificial Sequence
  Chemically synthesized
gugucccguguagcacucagaua

SEQ ID NO: 70777 - RNA, 23 nt, Artificial Sequence
  Chemically synthesized
uauuuaugagguugaugacccaa

SEQ ID NO: 70778 - RNA, 23 nt, Artificial Sequence
  Chemically synthesized
cauggagaccaucucugucccau

SEQ ID NO: 70779 - RNA, 23 nt, Artificial Sequence
  Chemically synthesized
cuuuuauaucagaggaccaccau

SEQ ID NO: 70780 - RNA, 23 nt, Artificial Sequence
  Chemically synthesized
caacaguuguuccguccauggga

SEQ ID NO: 70781 - RNA, 23 nt, Artificial Sequence
  Chemically synthesized
cuucaaaugcagaucuuuuccca

SEQ ID NO: 70782 - RNA, 23 nt, Artificial Sequence
  Chemically synthesized
ggaugguuccuuggucauucagg

SEQ ID NO: 70783 - RNA, 23 nt, Artificial Sequence
  Chemically synthesized
ugcaguaggucccuauauccagu

SEQ ID NO: 70784 - RNA, 23 nt, Artificial Sequence
  Chemically synthesized
cugacucuugcugaacuucagga

SEQ ID NO: 70785 - RNA, 23 nt, Artificial Sequence
  Chemically synthesized
gaaagcgaugaagaaugucucua

SEQ ID NO: 70786 - RNA, 23 nt, Artificial Sequence
  Chemically synthesized
ccuucuccaggccuugauuauga

SEQ ID NO: 70787 - RNA, 23 nt, Artificial Sequence
  Chemically synthesized
agugauugccauuuggcugaagu

SEQ ID NO: 70788 - RNA, 23 nt, Artificial Sequence
  Chemically synthesized
gaacugaccaggcagcuagagau

SEQ ID NO: 70789 - RNA, 23 nt, Artificial Sequence
  Chemically synthesized
cuaagcaaugggaaacuugugga

SEQ ID NO: 70790 - RNA, 23 nt, Artificial Sequence
  Chemically synthesized
gaagaauucaccauuagaggaca

SEQ ID NO: 70791 - RNA, 23 nt, Artificial Sequence
  Chemically synthesized
ccaaguuuaaaaagaaauggugu

SEQ ID NO: 70792 - RNA, 23 nt, Artificial Sequence
  Chemically synthesized
cgcuuugggauuaugaaccucag

SEQ ID NO: 70793 - RNA, 23 nt, Artificial Sequence
  Chemically synthesized
uggaguucaggagaagaugggca

SEQ ID NO: 70794 - RNA, 23 nt, Artificial Sequence
  Chemically synthesized
uuucuuuauggaguucaggagaa

SEQ ID NO: 70795 - RNA, 23 nt, Artificial Sequence
  Chemically synthesized
ugugugugcaggccacacagaaa

SEQ ID NO: 70796 - RNA, 23 nt, Artificial Sequence
  Chemically synthesized
cuugauguguaccuggaggagua

SEQ ID NO: 70797 - RNA, 23 nt, Artificial Sequence
  Chemically synthesized
gcuugauguguaccuggaggagu

SEQ ID NO: 70798 - RNA, 23 nt, Artificial Sequence
  Chemically synthesized
ccaaauccagaggcuccacaugu

SEQ ID NO: 70799 - RNA, 23 nt, Artificial Sequence
  Chemically synthesized
agaagaacugaccaggcagcuag

SEQ ID NO: 70800 - RNA, 23 nt, Artificial Sequence
  Chemically synthesized
cgacaacagcaacaaguugcuga

SEQ ID NO: 70801 - RNA, 23 nt, Artificial Sequence
  Chemically synthesized
ugaaacuuccacacagaauuuua

SEQ ID NO: 70802 - RNA, 23 nt, Artificial Sequence
  Chemically synthesized
ugucuaacgcaccaaggccucua

SEQ ID NO: 70803 - RNA, 23 nt, Artificial Sequence
  Chemically synthesized
cgaaagaauuccucggccacuca

SEQ ID NO: 70804 - RNA, 23 nt, Artificial Sequence
  Chemically synthesized
ucuucaguucaggagaaccauga

SEQ ID NO: 70805 - RNA, 23 nt, Artificial Sequence
  Chemically synthesized
cccagccuuccaaagacaccuua

SEQ ID NO: 70806 - RNA, 23 nt, Artificial Sequence
  Chemically synthesized
cagacccuuucuccagguucuaa

SEQ ID NO: 70807 - RNA, 23 nt, Artificial Sequence
  Chemically synthesized
cucuauaaggagcugcagcuaag

SEQ ID NO: 70808 - RNA, 23 nt, Artificial Sequence
  Chemically synthesized
gaacagaugaauaauuuguucca

SEQ ID NO: 70809 - RNA, 23 nt, Artificial Sequence
  Chemically synthesized
caacagcaacaaguugcugagca

SEQ ID NO: 70810 - RNA, 23 nt, Artificial Sequence
  Chemically synthesized
acgucagcaggccauacuguguu

SEQ ID NO: 70811 - RNA, 23 nt, Artificial Sequence
  Chemically synthesized
gaaccaaauccagaggcuccaca

SEQ ID NO: 70812 - RNA, 23 nt, Artificial Sequence
  Chemically synthesized
gcuuuuauaucagaggaccacca

SEQ ID NO: 70813 - RNA, 23 nt, Artificial Sequence
  Chemically synthesized
agugaugcugaccuagaagccuu

SEQ ID NO: 70814 - RNA, 23 nt, Artificial Sequence
  Chemically synthesized
guucaggagaaccaugaaaacga

SEQ ID NO: 70815 - RNA, 23 nt, Artificial Sequence
  Chemically synthesized
gcgccaggaaaaaacuuccagca

SEQ ID NO: 70816 - RNA, 23 nt, Artificial Sequence
  Chemically synthesized
cagguucuaagcaagaaagucca

SEQ ID NO: 70817 - RNA, 23 nt, Artificial Sequence
  Chemically synthesized
agagugauugccauuuggcugaa

SEQ ID NO: 70818 - RNA, 23 nt, Artificial Sequence
  Chemically synthesized
gaguguuuucagcagcugcuccu

SEQ ID NO: 70819 - RNA, 23 nt, Artificial Sequence
  Chemically synthesized
ucuguuaagaagaaguaauacga

SEQ ID NO: 70820 - RNA, 23 nt, Artificial Sequence
  Chemically synthesized
caagucagcuucugugacugcca

SEQ ID NO: 70821 - RNA, 23 nt, Artificial Sequence
  Chemically synthesized
uggagaccaucucugucccauca

SEQ ID NO: 70822 - RNA, 23 nt, Artificial Sequence
  Chemically synthesized
guuucuucaguucaggagaacca

SEQ ID NO: 70823 - RNA, 23 nt, Artificial Sequence
  Chemically synthesized
gagccuguuucuucaguucagga

SEQ ID NO: 70824 - RNA, 23 nt, Artificial Sequence
  Chemically synthesized
ucaacagcagcacccagagaaca

SEQ ID NO: 70825 - RNA, 23 nt, Artificial Sequence
  Chemically synthesized
agagaugcucaagaacggcagga

SEQ ID NO: 70826 - RNA, 23 nt, Artificial Sequence
  Chemically synthesized
cagcaaaaacagagggagcucgu

SEQ ID NO: 70827 - RNA, 23 nt, Artificial Sequence
  Chemically synthesized
ggaaaucagcucucuguccuguu

SEQ ID NO: 70828 - RNA, 23 nt, Artificial Sequence
  Chemically synthesized
gaaauaaagcaucuacgucagca

SEQ ID NO: 70829 - RNA, 23 nt, Artificial Sequence
  Chemically synthesized
ggaacgaaguucgcuucuuccuu

SEQ ID NO: 70830 - RNA, 23 nt, Artificial Sequence
  Chemically synthesized
cuucugugacugccagcucagaa

SEQ ID NO: 70831 - RNA, 23 nt, Artificial Sequence
  Chemically synthesized
cucauaccagagggccacacuuu

SEQ ID NO: 70832 - RNA, 23 nt, Artificial Sequence
  Chemically synthesized
acauuaagccagacggaaguucu

SEQ ID NO: 70833 - RNA, 23 nt, Artificial Sequence
  Chemically synthesized
aagaaacaaauugaaucaagagc

SEQ ID NO: 70834 - RNA, 23 nt, Artificial Sequence
  Chemically synthesized
aaaguagaagaacugaccaggca

SEQ ID NO: 70835 - RNA, 23 nt, Artificial Sequence
  Chemically synthesized
gaucagcgacaacagcaacaagu

SEQ ID NO: 70836 - RNA, 23 nt, Artificial Sequence
  Chemically synthesized
cagcagcaacagauugaagccca

SEQ ID NO: 70837 - RNA, 23 nt, Artificial Sequence
  Chemically synthesized
uaauaguccuaggauggaucuga

SEQ ID NO: 70838 - RNA, 23 nt, Artificial Sequence
  Chemically synthesized
auauugucagugaagaacuguua

SEQ ID NO: 70839 - RNA, 23 nt, Artificial Sequence
  Chemically synthesized
gacaauccuguuuucuacaagaa

SEQ ID NO: 70840 - RNA, 23 nt, Artificial Sequence
  Chemically synthesized
gaauucaccauuagaggacauuu

SEQ ID NO: 70841 - RNA, 23 nt, Artificial Sequence
  Chemically synthesized
gaaacuuccacacagaauuuuag

SEQ ID NO: 70842 - RNA, 23 nt, Artificial Sequence
  Chemically synthesized
auuucuuuauggaguucaggaga

SEQ ID NO: 70843 - RNA, 23 nt, Artificial Sequence
  Chemically synthesized
agugacaugcagacugcugcaga

SEQ ID NO: 70844 - RNA, 23 nt, Artificial Sequence
  Chemically synthesized
cagaaaucguuaaguuccuggua

SEQ ID NO: 70845 - RNA, 23 nt, Artificial Sequence
  Chemically synthesized
gaaguucgcuucuuccuucguca

SEQ ID NO: 70846 - RNA, 23 nt, Artificial Sequence
  Chemically synthesized
gcuuuacugcuagauucgucuuu

SEQ ID NO: 70847 - RNA, 23 nt, Artificial Sequence
  Chemically synthesized
agggccacacuuuucaaguguau

SEQ ID NO: 70848 - RNA, 23 nt, Artificial Sequence
  Chemically synthesized
ucaauauauuccauguauacgca

SEQ ID NO: 70849 - RNA, 23 nt, Artificial Sequence
  Chemically synthesized
auaccuucgguuggccaagacca

SEQ ID NO: 70850 - RNA, 23 nt, Artificial Sequence
  Chemically synthesized
cuucagacauuaagccagacgga

SEQ ID NO: 70851 - RNA, 23 nt, Artificial Sequence
  Chemically synthesized
gaaagagaagaaagugcguccgu

SEQ ID NO: 70852 - RNA, 23 nt, Artificial Sequence
  Chemically synthesized
ucuguaccucaaagcacugggaa

SEQ ID NO: 70853 - RNA, 23 nt, Artificial Sequence
  Chemically synthesized
gggaaaucagcucucuguccugu

SEQ ID NO: 70854 - RNA, 23 nt, Artificial Sequence
  Chemically synthesized
caguugggaaaucagcucucugu

SEQ ID NO: 70855 - RNA, 23 nt, Artificial Sequence
  Chemically synthesized
guuuucuacaagaauccugucua

SEQ ID NO: 70856 - RNA, 23 nt, Artificial Sequence
  Chemically synthesized
uucuuagcugcagcuccuuauag

SEQ ID NO: 70857 - RNA, 23 nt, Artificial Sequence
  Chemically synthesized
ucuggcucuguaauagaacuacg

SEQ ID NO: 70858 - RNA, 23 nt, Artificial Sequence
  Chemically synthesized
uuugguucuucuggguuauucug

SEQ ID NO: 70859 - RNA, 23 nt, Artificial Sequence
  Chemically synthesized
ucauuauccgcaacuggacguuc

SEQ ID NO: 70860 - RNA, 23 nt, Artificial Sequence
  Chemically synthesized
uauacuuaucugagugcuacacg

SEQ ID NO: 70861 - RNA, 23 nt, Artificial Sequence
  Chemically synthesized
ucaaccucauaaauaauucucug

SEQ ID NO: 70862 - RNA, 23 nt, Artificial Sequence
  Chemically synthesized
uugcguauacauggaauauauug

SEQ ID NO: 70863 - RNA, 23 nt, Artificial Sequence
  Chemically synthesized
ugagccaguuuuacgcaaguuug

SEQ ID NO: 70864 - RNA, 23 nt, Artificial Sequence
  Chemically synthesized
uuuguaggaacaggaggugguac

SEQ ID NO: 70865 - RNA, 23 nt, Artificial Sequence
  Chemically synthesized
ucgggcuccacauguaaauaugg

SEQ ID NO: 70866 - RNA, 23 nt, Artificial Sequence
  Chemically synthesized
uucugggcagcagcaauuacagg

SEQ ID NO: 70867 - RNA, 23 nt, Artificial Sequence
  Chemically synthesized
uauacacuugaaaaguguggccc

SEQ ID NO: 70868 - RNA, 23 nt, Artificial Sequence
  Chemically synthesized
ucugaagguggcugauuaguuug

SEQ ID NO: 70869 - RNA, 23 nt, Artificial Sequence
  Chemically synthesized
ucuagcugccuggucaguucuuc

SEQ ID NO: 70870 - RNA, 23 nt, Artificial Sequence
  Chemically synthesized
ucacgcuaaauguccucuaaugg

SEQ ID NO: 70871 - RNA, 23 nt, Artificial Sequence
  Chemically synthesized
ucuggcuuaaugucugaaggugg

SEQ ID NO: 70872 - RNA, 23 nt, Artificial Sequence
  Chemically synthesized
uacgcaaguuuguccuuuuacca

SEQ ID NO: 70873 - RNA, 23 nt, Artificial Sequence
  Chemically synthesized
uuuuuuccuggcgccugcuguug

SEQ ID NO: 70874 - RNA, 23 nt, Artificial Sequence
  Chemically synthesized
uuaccauauacacuugaaaagug

SEQ ID NO: 70875 - RNA, 23 nt, Artificial Sequence
  Chemically synthesized
uuagcugcagcuccuuauagagg

SEQ ID NO: 70876 - RNA, 23 nt, Artificial Sequence
  Chemically synthesized
uccuccauuuccucgcacuuauc

SEQ ID NO: 70877 - RNA, 23 nt, Artificial Sequence
  Chemically synthesized
auacgcucugagccaguuuuacg

SEQ ID NO: 70878 - RNA, 23 nt, Artificial Sequence
  Chemically synthesized
aaucacucucgccggguucuuug

SEQ ID NO: 70879 - RNA, 23 nt, Artificial Sequence
  Chemically synthesized
uuucuggaguaacuggaacuucu

SEQ ID NO: 70880 - RNA, 23 nt, Artificial Sequence
  Chemically synthesized
ugccguucuugagcaucucuagc

SEQ ID NO: 70881 - RNA, 23 nt, Artificial Sequence
  Chemically synthesized
uucccuguggaugauugucaugc

SEQ ID NO: 70882 - RNA, 23 nt, Artificial Sequence
  Chemically synthesized
uccugcucagcaacuuguugcug

SEQ ID NO: 70883 - RNA, 23 nt, Artificial Sequence
  Chemically synthesized
uuaggagcagcugcugaaaacac

SEQ ID NO: 70884 - RNA, 23 nt, Artificial Sequence
  Chemically synthesized
gccaaaaauaaucguauuacuuc

SEQ ID NO: 70885 - RNA, 23 nt, Artificial Sequence
  Chemically synthesized
uuagaggccuuggugcguuagac

SEQ ID NO: 70886 - RNA, 23 nt, Artificial Sequence
  Chemically synthesized
ucagccaaauggcaaucacucuc

SEQ ID NO: 70887 - RNA, 23 nt, Artificial Sequence
  Chemically synthesized
ucucuagcugccuggucaguucu

SEQ ID NO: 70888 - RNA, 23 nt, Artificial Sequence
  Chemically synthesized
uuccugauucucagcuauuucuu

SEQ ID NO: 70889 - RNA, 23 nt, Artificial Sequence
  Chemically synthesized
uguggaaguuucaggccaagcuc

SEQ ID NO: 70890 - RNA, 23 nt, Artificial Sequence
  Chemically synthesized
uuagagccuuuaguuugugaagc

SEQ ID NO: 70891 - RNA, 23 nt, Artificial Sequence
  Chemically synthesized
ugaaugaccaaggaaccauccgg

SEQ ID NO: 70892 - RNA, 23 nt, Artificial Sequence
  Chemically synthesized
uccugauucucagcuauuucuuu

SEQ ID NO: 70893 - RNA, 23 nt, Artificial Sequence
  Chemically synthesized
ucagccuacaaacaagauucuac

SEQ ID NO: 70894 - RNA, 23 nt, Artificial Sequence
  Chemically synthesized
uuucuggcaggaggacugguuua

SEQ ID NO: 70895 - RNA, 23 nt, Artificial Sequence
  Chemically synthesized
uuucccaacugcccaauaaauga

SEQ ID NO: 70896 - RNA, 23 nt, Artificial Sequence
  Chemically synthesized
auguucucugggugcugcuguug

SEQ ID NO: 70897 - RNA, 23 nt, Artificial Sequence
  Chemically synthesized
auauacacuugaaaaguguggcc

SEQ ID NO: 70898 - RNA, 23 nt, Artificial Sequence
  Chemically synthesized
ucagcggaaccucuccaucauca

SEQ ID NO: 70899 - RNA, 23 nt, Artificial Sequence
  Chemically synthesized
ucgcacuuaucugcagcagucug

SEQ ID NO: 70900 - RNA, 23 nt, Artificial Sequence
  Chemically synthesized
uucgggcuccacauguaaauaug

SEQ ID NO: 70901 - RNA, 23 nt, Artificial Sequence
  Chemically synthesized
uucuccugaacugaagaaacagg

SEQ ID NO: 70902 - RNA, 23 nt, Artificial Sequence
  Chemically synthesized
uucucugggugcugcuguugauu

SEQ ID NO: 70903 - RNA, 23 nt, Artificial Sequence
  Chemically synthesized
uugagggcauccgaggcauagua

SEQ ID NO: 70904 - RNA, 23 nt, Artificial Sequence
  Chemically synthesized
ugaggcagcacaauguaauggag

SEQ ID NO: 70905 - RNA, 23 nt, Artificial Sequence
  Chemically synthesized
auuugguucuucuggguuauucu

SEQ ID NO: 70906 - RNA, 23 nt, Artificial Sequence
  Chemically synthesized
agucacagaagcugacuuggaug

SEQ ID NO: 70907 - RNA, 23 nt, Artificial Sequence
  Chemically synthesized
ugagguucauaaucccaaagcgc

SEQ ID NO: 70908 - RNA, 23 nt, Artificial Sequence
  Chemically synthesized
uuuccugaaguucagcaagaguc

SEQ ID NO: 70909 - RNA, 23 nt, Artificial Sequence
  Chemically synthesized
aucuucuccugaacuccauaaag

SEQ ID NO: 70910 - RNA, 23 nt, Artificial Sequence
  Chemically synthesized
uucuggauuucuacugggcuuuc

SEQ ID NO: 70911 - RNA, 23 nt, Artificial Sequence
  Chemically synthesized
cugaguggccgaggaauucuuuc

SEQ ID NO: 70912 - RNA, 23 nt, Artificial Sequence
  Chemically synthesized
uugcccuggcuauuggaauaaau

SEQ ID NO: 70913 - RNA, 23 nt, Artificial Sequence
  Chemically synthesized
uucuggaguaacuggaacuucug

SEQ ID NO: 70914 - RNA, 23 nt, Artificial Sequence
  Chemically synthesized
ugcuguugucgcugaucuuguug

SEQ ID NO: 70915 - RNA, 23 nt, Artificial Sequence
  Chemically synthesized
ucccaacugcccaauaaaugauc

SEQ ID NO: 70916 - RNA, 23 nt, Artificial Sequence
  Chemically synthesized
agacauucuucaucgcuuucaag

SEQ ID NO: 70917 - RNA, 23 nt, Artificial Sequence
  Chemically synthesized
augcccaucuucuccugaacucc

SEQ ID NO: 70918 - RNA, 23 nt, Artificial Sequence
  Chemically synthesized
ucuggguuauucuggagauuugg

SEQ ID NO: 70919 - RNA, 23 nt, Artificial Sequence
  Chemically synthesized
uaguucccauggacggaacaacu

SEQ ID NO: 70920 - RNA, 23 nt, Artificial Sequence
  Chemically synthesized
ugaagguggcugauuaguuuguc

SEQ ID NO: 70921 - RNA, 23 nt, Artificial Sequence
  Chemically synthesized
uccaccacgucucugcauauugu

SEQ ID NO: 70922 - RNA, 23 nt, Artificial Sequence
  Chemically synthesized
cuugauucaauuuguuucuuagc

SEQ ID NO: 70923 - RNA, 23 nt, Artificial Sequence
  Chemically synthesized
aucguauuacuucuucuuaacag

SEQ ID NO: 70924 - RNA, 23 nt, Artificial Sequence
  Chemically synthesized
uacaggcuuaccauauacacuug

SEQ ID NO: 70925 - RNA, 23 nt, Artificial Sequence
  Chemically synthesized
uggacuggucuacugcaucaaac

SEQ ID NO: 70926 - RNA, 23 nt, Artificial Sequence
  Chemically synthesized
ugagguacagaagcagagccuug

SEQ ID NO: 70927 - RNA, 23 nt, Artificial Sequence
  Chemically synthesized
ucuggaguaacuggaacuucugu

SEQ ID NO: 70928 - RNA, 23 nt, Artificial Sequence
  Chemically synthesized
uuaagcgcuguuccuuaguugcc

SEQ ID NO: 70929 - RNA, 23 nt, Artificial Sequence
  Chemically synthesized
acugguuuaggagcagcugcuga

SEQ ID NO: 70930 - RNA, 23 nt, Artificial Sequence
  Chemically synthesized
uaaucaaggccuggagaaggagc

SEQ ID NO: 70931 - RNA, 23 nt, Artificial Sequence
  Chemically synthesized
ucuccugaacugaagaaacaggc

SEQ ID NO: 70932 - RNA, 23 nt, Artificial Sequence
  Chemically synthesized
uucccauggacggaacaacuguu

SEQ ID NO: 70933 - RNA, 23 nt, Artificial Sequence
  Chemically synthesized
acuuccgucuggcuuaaugucug

SEQ ID NO: 70934 - RNA, 23 nt, Artificial Sequence
  Chemically synthesized
ucagccacugcagacugauuguc

SEQ ID NO: 70935 - RNA, 23 nt, Artificial Sequence
  Chemically synthesized
caagauucuacaucuaauuacug

SEQ ID NO: 70936 - RNA, 23 nt, Artificial Sequence
  Chemically synthesized
aaucagagacagcgaugugacgg

SEQ ID NO: 70937 - RNA, 23 nt, Artificial Sequence
  Chemically synthesized
uacugagauacacgguaagaaac

SEQ ID NO: 70938 - RNA, 23 nt, Artificial Sequence
  Chemically synthesized
ugguccucugauauaaaagcuuc

SEQ ID NO: 70939 - RNA, 23 nt, Artificial Sequence
  Chemically synthesized
ugggcagugucuguauuuucauc

SEQ ID NO: 70940 - RNA, 23 nt, Artificial Sequence
  Chemically synthesized
ucugaauuacgcuuauucaaaca

SEQ ID NO: 70941 - RNA, 23 nt, Artificial Sequence
  Chemically synthesized
uugcugcuggcgagaugccauuu

SEQ ID NO: 70942 - RNA, 23 nt, Artificial Sequence
  Chemically synthesized
ucuaauuacugguaccguagcuu

SEQ ID NO: 70943 - RNA, 23 nt, Artificial Sequence
  Chemically synthesized
ucugagguucauaaucccaaagc

SEQ ID NO: 70944 - RNA, 23 nt, Artificial Sequence
  Chemically synthesized
caaacuguaccaggaacuuaacg

SEQ ID NO: 70945 - RNA, 23 nt, Artificial Sequence
  Chemically synthesized
ugaagagccgugaugccuucauc

SEQ ID NO: 70946 - RNA, 23 nt, Artificial Sequence
  Chemically synthesized
ucgguaaggauuagauaagaaag

SEQ ID NO: 70947 - RNA, 23 nt, Artificial Sequence
  Chemically synthesized
uacacuugaaaaguguggcccuc

SEQ ID NO: 70948 - RNA, 23 nt, Artificial Sequence
  Chemically synthesized
uguggcccucugguaugagucuu

SEQ ID NO: 70949 - RNA, 23 nt, Artificial Sequence
  Chemically synthesized
uuaguucccauggacggaacaac

SEQ ID NO: 70950 - RNA, 23 nt, Artificial Sequence
  Chemically synthesized
aagcgcuguuccuuaguugccag

SEQ ID NO: 70951 - RNA, 23 nt, Artificial Sequence
  Chemically synthesized
aacuguuuuuaaagucagcuaug

SEQ ID NO: 70952 - RNA, 23 nt, Artificial Sequence
  Chemically synthesized
uuccucgcacuuaucugcagcag

SEQ ID NO: 70953 - RNA, 23 nt, Artificial Sequence
  Chemically synthesized
auuucuguguggccugcacacac

SEQ ID NO: 70954 - RNA, 23 nt, Artificial Sequence
  Chemically synthesized
uuaaugucugaagguggcugauu

SEQ ID NO: 70955 - RNA, 23 nt, Artificial Sequence
  Chemically synthesized
auccaccacgucucugcauauug

SEQ ID NO: 70956 - RNA, 23 nt, Artificial Sequence
  Chemically synthesized
cauaguagacgacuggauauagg

SEQ ID NO: 70957 - RNA, 23 nt, Artificial Sequence
  Chemically synthesized
uccuccacaaguuucccauugcu

SEQ ID NO: 70958 - RNA, 23 nt, Artificial Sequence
  Chemically synthesized
uccacguggccuuuaagugcucu

SEQ ID NO: 70959 - RNA, 23 nt, Artificial Sequence
  Chemically synthesized
auuucccaacugcccaauaaaug

SEQ ID NO: 70960 - RNA, 23 nt, Artificial Sequence
  Chemically synthesized
uucccaacugcccaauaaaugau

SEQ ID NO: 70961 - RNA, 23 nt, Artificial Sequence
  Chemically synthesized
augggcagcucaucaucauucug

SEQ ID NO: 70962 - RNA, 23 nt, Artificial Sequence
  Chemically synthesized
ucuucuccugaacuccauaaaga

SEQ ID NO: 70963 - RNA, 23 nt, Artificial Sequence
  Chemically synthesized
auucugggcagcagcaauuacag

SEQ ID NO: 70964 - RNA, 23 nt, Artificial Sequence
  Chemically synthesized
ucugguucuuccucagaguacca

SEQ ID NO: 70965 - RNA, 23 nt, Artificial Sequence
  Chemically synthesized
cuaugaucuugacaaauauuacg

SEQ ID NO: 70966 - RNA, 23 nt, Artificial Sequence
  Chemically synthesized
uuuaggagcagcugcugaaaaca

SEQ ID NO: 70967 - RNA, 23 nt, Artificial Sequence
  Chemically synthesized
agcuccuuugucuugguuuaauu

SEQ ID NO: 70968 - RNA, 23 nt, Artificial Sequence
  Chemically synthesized
ucuuggguacagucccagcaagu

SEQ ID NO: 70969 - RNA, 23 nt, Artificial Sequence
  Chemically synthesized
uuggguacagucccagcaaguua

SEQ ID NO: 70970 - RNA, 23 nt, Artificial Sequence
  Chemically synthesized
uccacauguaaauauggauucug

SEQ ID NO: 70971 - RNA, 23 nt, Artificial Sequence
  Chemically synthesized
ugauucugggcagcagcaauuac

SEQ ID NO: 70972 - RNA, 23 nt, Artificial Sequence
  Chemically synthesized
acagccugcuggaaguuuuuucc

SEQ ID NO: 70973 - RNA, 23 nt, Artificial Sequence
  Chemically synthesized
aguaaggugucuuuggaaggcug

SEQ ID NO: 70974 - RNA, 23 nt, Artificial Sequence
  Chemically synthesized
uuggcauucugcucuugauucaa

SEQ ID NO: 70975 - RNA, 23 nt, Artificial Sequence
  Chemically synthesized
aaacacucaacaggacagagagc

SEQ ID NO: 70976 - RNA, 23 nt, Artificial Sequence
  Chemically synthesized
ucaacaggacagagagcugauuu

SEQ ID NO: 70977 - RNA, 23 nt, Artificial Sequence
  Chemically synthesized
uaucugagugcuacacgggacac

SEQ ID NO: 70978 - RNA, 23 nt, Artificial Sequence
  Chemically synthesized
uugggucaucaaccucauaaaua

SEQ ID NO: 70979 - RNA, 23 nt, Artificial Sequence
  Chemically synthesized
augggacagagauggucuccaug

SEQ ID NO: 70980 - RNA, 23 nt, Artificial Sequence
  Chemically synthesized
auggugguccucugauauaaaag

SEQ ID NO: 70981 - RNA, 23 nt, Artificial Sequence
  Chemically synthesized
ucccauggacggaacaacuguug

SEQ ID NO: 70982 - RNA, 23 nt, Artificial Sequence
  Chemically synthesized
ugggaaaagaucugcauuugaag

SEQ ID NO: 70983 - RNA, 23 nt, Artificial Sequence
  Chemically synthesized
ccugaaugaccaaggaaccaucc

SEQ ID NO: 70984 - RNA, 23 nt, Artificial Sequence
  Chemically synthesized
acuggauauagggaccuacugca

SEQ ID NO: 70985 - RNA, 23 nt, Artificial Sequence
  Chemically synthesized
uccugaaguucagcaagagucag

SEQ ID NO: 70986 - RNA, 23 nt, Artificial Sequence
  Chemically synthesized
uagagacauucuucaucgcuuuc

SEQ ID NO: 70987 - RNA, 23 nt, Artificial Sequence
  Chemically synthesized
ucauaaucaaggccuggagaagg

SEQ ID NO: 70988 - RNA, 23 nt, Artificial Sequence
  Chemically synthesized
acuucagccaaauggcaaucacu

SEQ ID NO: 70989 - RNA, 23 nt, Artificial Sequence
  Chemically synthesized
aucucuagcugccuggucaguuc

SEQ ID NO: 70990 - RNA, 23 nt, Artificial Sequence
  Chemically synthesized
uccacaaguuucccauugcuuag

SEQ ID NO: 70991 - RNA, 23 nt, Artificial Sequence
  Chemically synthesized
uguccucuaauggugaauucuuc

SEQ ID NO: 70992 - RNA, 23 nt, Artificial Sequence
  Chemically synthesized
acaccauuucuuuuuaaacuugg

SEQ ID NO: 70993 - RNA, 23 nt, Artificial Sequence
  Chemically synthesized
cugagguucauaaucccaaagcg

SEQ ID NO: 70994 - RNA, 23 nt, Artificial Sequence
  Chemically synthesized
ugcccaucuucuccugaacucca

SEQ ID NO: 70995 - RNA, 23 nt, Artificial Sequence
  Chemically synthesized
uucuccugaacuccauaaagaaa

SEQ ID NO: 70996 - RNA, 23 nt, Artificial Sequence
  Chemically synthesized
uuucuguguggccugcacacaca

SEQ ID NO: 70997 - RNA, 23 nt, Artificial Sequence
  Chemically synthesized
uacuccuccagguacacaucaag

SEQ ID NO: 70998 - RNA, 23 nt, Artificial Sequence
  Chemically synthesized
acuccuccagguacacaucaagc

SEQ ID NO: 70999 - RNA, 23 nt, Artificial Sequence
  Chemically synthesized
acauguggagccucuggauuugg

SEQ ID NO: 71000 - RNA, 23 nt, Artificial Sequence
  Chemically synthesized
cuagcugccuggucaguucuucu

SEQ ID NO: 71001 - RNA, 23 nt, Artificial Sequence
  Chemically synthesized
ucagcaacuuguugcuguugucg

SEQ ID NO: 71002 - RNA, 23 nt, Artificial Sequence
  Chemically synthesized
uaaaauucuguguggaaguuuca

SEQ ID NO: 71003 - RNA, 23 nt, Artificial Sequence
  Chemically synthesized
uagaggccuuggugcguuagaca

SEQ ID NO: 71004 - RNA, 23 nt, Artificial Sequence
  Chemically synthesized
ugaguggccgaggaauucuuucg

SEQ ID NO: 71005 - RNA, 23 nt, Artificial Sequence
  Chemically synthesized
ucaugguucuccugaacugaaga

SEQ ID NO: 71006 - RNA, 23 nt, Artificial Sequence
  Chemically synthesized
uaaggugucuuuggaaggcuggg

SEQ ID NO: 71007 - RNA, 23 nt, Artificial Sequence
  Chemically synthesized
uuagaaccuggagaaagggucug

SEQ ID NO: 71008 - RNA, 23 nt, Artificial Sequence
  Chemically synthesized
cuuagcugcagcuccuuauagag

SEQ ID NO: 71009 - RNA, 23 nt, Artificial Sequence
  Chemically synthesized
uggaacaaauuauucaucuguuc

SEQ ID NO: 71010 - RNA, 23 nt, Artificial Sequence
  Chemically synthesized
ugcucagcaacuuguugcuguug

SEQ ID NO: 71011 - RNA, 23 nt, Artificial Sequence
  Chemically synthesized
aacacaguauggccugcugacgu

SEQ ID NO: 71012 - RNA, 23 nt, Artificial Sequence
  Chemically synthesized
uguggagccucuggauuugguuc

SEQ ID NO: 71013 - RNA, 23 nt, Artificial Sequence
  Chemically synthesized
uggugguccucugauauaaaagc

SEQ ID NO: 71014 - RNA, 23 nt, Artificial Sequence
  Chemically synthesized
aaggcuucuaggucagcaucacu

SEQ ID NO: 71015 - RNA, 23 nt, Artificial Sequence
  Chemically synthesized
ucguuuucaugguucuccugaac

SEQ ID NO: 71016 - RNA, 23 nt, Artificial Sequence
  Chemically synthesized
ugcuggaaguuuuuuccuggcgc

SEQ ID NO: 71017 - RNA, 23 nt, Artificial Sequence
  Chemically synthesized
uggacuuucuugcuuagaaccug

SEQ ID NO: 71018 - RNA, 23 nt, Artificial Sequence
  Chemically synthesized
uucagccaaauggcaaucacucu

SEQ ID NO: 71019 - RNA, 23 nt, Artificial Sequence
  Chemically synthesized
aggagcagcugcugaaaacacuc

SEQ ID NO: 71020 - RNA, 23 nt, Artificial Sequence
  Chemically synthesized
ucguauuacuucuucuuaacaga

SEQ ID NO: 71021 - RNA, 23 nt, Artificial Sequence
  Chemically synthesized
uggcagucacagaagcugacuug

SEQ ID NO: 71022 - RNA, 23 nt, Artificial Sequence
  Chemically synthesized
ugaugggacagagauggucucca

SEQ ID NO: 71023 - RNA, 23 nt, Artificial Sequence
  Chemically synthesized
ugguucuccugaacugaagaaac

SEQ ID NO: 71024 - RNA, 23 nt, Artificial Sequence
  Chemically synthesized
uccugaacugaagaaacaggcuc

SEQ ID NO: 71025 - RNA, 23 nt, Artificial Sequence
  Chemically synthesized
uguucucugggugcugcuguuga

SEQ ID NO: 71026 - RNA, 23 nt, Artificial Sequence
  Chemically synthesized
uccugccguucuugagcaucucu

SEQ ID NO: 71027 - RNA, 23 nt, Artificial Sequence
  Chemically synthesized
acgagcucccucuguuuuugcug

SEQ ID NO: 71028 - RNA, 23 nt, Artificial Sequence
  Chemically synthesized
aacaggacagagagcugauuucc

SEQ ID NO: 71029 - RNA, 23 nt, Artificial Sequence
  Chemically synthesized
ugcugacguagaugcuuuauuuc

SEQ ID NO: 71030 - RNA, 23 nt, Artificial Sequence
  Chemically synthesized
aaggaagaagcgaacuucguucc

SEQ ID NO: 71031 - RNA, 23 nt, Artificial Sequence
  Chemically synthesized
uucugagcuggcagucacagaag

SEQ ID NO: 71032 - RNA, 23 nt, Artificial Sequence
  Chemically synthesized
aaaguguggcccucugguaugag

SEQ ID NO: 71033 - RNA, 23 nt, Artificial Sequence
  Chemically synthesized
agaacuuccgucuggcuuaaugu

SEQ ID NO: 71034 - RNA, 23 nt, Artificial Sequence
  Chemically synthesized
gcucuugauucaauuuguuucuu

SEQ ID NO: 71035 - RNA, 23 nt, Artificial Sequence
  Chemically synthesized
ugccuggucaguucuucuacuuu

SEQ ID NO: 71036 - RNA, 23 nt, Artificial Sequence
  Chemically synthesized
acuuguugcuguugucgcugauc

SEQ ID NO: 71037 - RNA, 23 nt, Artificial Sequence
  Chemically synthesized
ugggcuucaaucuguugcugcug

SEQ ID NO: 71038 - RNA, 23 nt, Artificial Sequence
  Chemically synthesized
ucagauccauccuaggacuauua

SEQ ID NO: 71039 - RNA, 23 nt, Artificial Sequence
  Chemically synthesized
uaacaguucuucacugacaauau

SEQ ID NO: 71040 - RNA, 23 nt, Artificial Sequence
  Chemically synthesized
uucuuguagaaaacaggauuguc

SEQ ID NO: 71041 - RNA, 23 nt, Artificial Sequence
  Chemically synthesized
aaauguccucuaauggugaauuc

SEQ ID NO: 71042 - RNA, 23 nt, Artificial Sequence
  Chemically synthesized
cuaaaauucuguguggaaguuuc

SEQ ID NO: 71043 - RNA, 23 nt, Artificial Sequence
  Chemically synthesized
ucuccugaacuccauaaagaaau

SEQ ID NO: 71044 - RNA, 23 nt, Artificial Sequence
  Chemically synthesized
ucugcagcagucugcaugucacu

SEQ ID NO: 71045 - RNA, 23 nt, Artificial Sequence
  Chemically synthesized
uaccaggaacuuaacgauuucug

SEQ ID NO: 71046 - RNA, 23 nt, Artificial Sequence
  Chemically synthesized
ugacgaaggaagaagcgaacuuc

SEQ ID NO: 71047 - RNA, 23 nt, Artificial Sequence
  Chemically synthesized
aaagacgaaucuagcaguaaagc

SEQ ID NO: 71048 - RNA, 23 nt, Artificial Sequence
  Chemically synthesized
auacacuugaaaaguguggcccu

SEQ ID NO: 71049 - RNA, 23 nt, Artificial Sequence
  Chemically synthesized
ugcguauacauggaauauauuga

SEQ ID NO: 71050 - RNA, 23 nt, Artificial Sequence
  Chemically synthesized
uggucuuggccaaccgaagguau

SEQ ID NO: 71051 - RNA, 23 nt, Artificial Sequence
  Chemically synthesized
uccgucuggcuuaaugucugaag

SEQ ID NO: 71052 - RNA, 23 nt, Artificial Sequence
  Chemically synthesized
acggacgcacuuucuucucuuuc

SEQ ID NO: 71053 - RNA, 23 nt, Artificial Sequence
  Chemically synthesized
uucccagugcuuugagguacaga

SEQ ID NO: 71054 - RNA, 23 nt, Artificial Sequence
  Chemically synthesized
acaggacagagagcugauuuccc

SEQ ID NO: 71055 - RNA, 23 nt, Artificial Sequence
  Chemically synthesized
acagagagcugauuucccaacug

SEQ ID NO: 71056 - RNA, 23 nt, Artificial Sequence
  Chemically synthesized
uagacaggauucuuguagaaaac

SEQ ID NO: 71057 - RNA, 23 nt, Artificial Sequence
  Chemically synthesized
ccaucauacccauccaagucagc

SEQ ID NO: 71058 - RNA, 23 nt, Artificial Sequence
  Chemically synthesized
gagugaugcugaccuagaagccu

SEQ ID NO: 71059 - RNA, 23 nt, Artificial Sequence
  Chemically synthesized
agagugaugcugaccuagaagcc

SEQ ID NO: 71060 - RNA, 23 nt, Artificial Sequence
  Chemically synthesized
cagagugaugcugaccuagaagc

SEQ ID NO: 71061 - RNA, 23 nt, Artificial Sequence
  Chemically synthesized
ccagagugaugcugaccuagaag

SEQ ID NO: 71062 - RNA, 23 nt, Artificial Sequence
  Chemically synthesized
accagagugaugcugaccuagaa

SEQ ID NO: 71063 - RNA, 23 nt, Artificial Sequence
  Chemically synthesized
ugguugucagugaacaauaacuu

SEQ ID NO: 71064 - RNA, 23 nt, Artificial Sequence
  Chemically synthesized
uugguugucagugaacaauaacu

SEQ ID NO: 71065 - RNA, 23 nt, Artificial Sequence
  Chemically synthesized
guugguugucagugaacaauaac

SEQ ID NO: 71066 - RNA, 23 nt, Artificial Sequence
  Chemically synthesized
aguugguugucagugaacaauaa

SEQ ID NO: 71067 - RNA, 23 nt, Artificial Sequence
  Chemically synthesized
gaaggagacugcaugacaaucau

SEQ ID NO: 71068 - RNA, 23 nt, Artificial Sequence
  Chemically synthesized
agaaggagacugcaugacaauca

SEQ ID NO: 71069 - RNA, 23 nt, Artificial Sequence
  Chemically synthesized
aagaaggagacugcaugacaauc

SEQ ID NO: 71070 - RNA, 23 nt, Artificial Sequence
  Chemically synthesized
aaagaaggagacugcaugacaau

SEQ ID NO: 71071 - RNA, 23 nt, Artificial Sequence
  Chemically synthesized
gaaagaaggagacugcaugacaa

SEQ ID NO: 71072 - RNA, 23 nt, Artificial Sequence
  Chemically synthesized
gcugggacuguacccaagaauua

SEQ ID NO: 71073 - RNA, 23 nt, Artificial Sequence
  Chemically synthesized
gaauuaaaccaagacaaaggagc

SEQ ID NO: 71074 - RNA, 23 nt, Artificial Sequence
  Chemically synthesized
agaauuaaaccaagacaaaggag

SEQ ID NO: 71075 - RNA, 23 nt, Artificial Sequence
  Chemically synthesized
aagaauuaaaccaagacaaagga

SEQ ID NO: 71076 - RNA, 23 nt, Artificial Sequence
  Chemically synthesized
aagacgaagaugaaaucgaaugg

SEQ ID NO: 71077 - RNA, 23 nt, Artificial Sequence
  Chemically synthesized
gaagacgaagaugaaaucgaaug

SEQ ID NO: 71078 - RNA, 23 nt, Artificial Sequence
  Chemically synthesized
ggaagacgaagaugaaaucgaau

SEQ ID NO: 71079 - RNA, 23 nt, Artificial Sequence
  Chemically synthesized
ggauccaaguuuaaaaagaaaug

SEQ ID NO: 71080 - RNA, 23 nt, Artificial Sequence
  Chemically synthesized
aggauccaaguuuaaaaagaaau

SEQ ID NO: 71081 - RNA, 23 nt, Artificial Sequence
  Chemically synthesized
caggauccaaguuuaaaaagaaa

SEQ ID NO: 71082 - RNA, 23 nt, Artificial Sequence
  Chemically synthesized
uccaugggaacuaaaccaaaacc

SEQ ID NO: 71083 - RNA, 23 nt, Artificial Sequence
  Chemically synthesized
guccaugggaacuaaaccaaaac

SEQ ID NO: 71084 - RNA, 23 nt, Artificial Sequence
  Chemically synthesized
cguccaugggaacuaaaccaaaa

SEQ ID NO: 71085 - RNA, 23 nt, Artificial Sequence
  Chemically synthesized
ccguccaugggaacuaaaccaaa

SEQ ID NO: 71086 - RNA, 23 nt, Artificial Sequence
  Chemically synthesized
cauugugaguggaccaagaucuc

SEQ ID NO: 71087 - RNA, 23 nt, Artificial Sequence
  Chemically synthesized
acauugugaguggaccaagaucu

SEQ ID NO: 71088 - RNA, 23 nt, Artificial Sequence
  Chemically synthesized
cuacaagaauccugucuaguaaa

SEQ ID NO: 71089 - RNA, 23 nt, Artificial Sequence
  Chemically synthesized
ucuacaagaauccugucuaguaa

SEQ ID NO: 71090 - RNA, 23 nt, Artificial Sequence
  Chemically synthesized
acuuccacccuucagaaaacccc

SEQ ID NO: 71091 - RNA, 23 nt, Artificial Sequence
  Chemically synthesized
uacuuccacccuucagaaaaccc

SEQ ID NO: 71092 - RNA, 23 nt, Artificial Sequence
  Chemically synthesized
uuacuuccacccuucagaaaacc

SEQ ID NO: 71093 - RNA, 23 nt, Artificial Sequence
  Chemically synthesized
cuuacuuccacccuucagaaaac

SEQ ID NO: 71094 - RNA, 23 nt, Artificial Sequence
  Chemically synthesized
ccuuacuuccacccuucagaaaa

SEQ ID NO: 71095 - RNA, 23 nt, Artificial Sequence
  Chemically synthesized
aacuuguggaggaaauugaacag

SEQ ID NO: 71096 - RNA, 23 nt, Artificial Sequence
  Chemically synthesized
aaacuuguggaggaaauugaaca

SEQ ID NO: 71097 - RNA, 23 nt, Artificial Sequence
  Chemically synthesized
gaaacuuguggaggaaauugaac

SEQ ID NO: 71098 - RNA, 23 nt, Artificial Sequence
  Chemically synthesized
ggaaacuuguggaggaaauugaa

SEQ ID NO: 71099 - RNA, 23 nt, Artificial Sequence
  Chemically synthesized
accuuacuuccacccuucagaaa

SEQ ID NO: 71100 - RNA, 23 nt, Artificial Sequence
  Chemically synthesized
cgagcgucgaagagacaaagccg

SEQ ID NO: 71101 - RNA, 23 nt, Artificial Sequence
  Chemically synthesized
acgagcgucgaagagacaaagcc

SEQ ID NO: 71102 - RNA, 23 nt, Artificial Sequence
  Chemically synthesized
cacgagcgucgaagagacaaagc

SEQ ID NO: 71103 - RNA, 23 nt, Artificial Sequence
  Chemically synthesized
ucacgagcgucgaagagacaaag

SEQ ID NO: 71104 - RNA, 23 nt, Artificial Sequence
  Chemically synthesized
gucacgagcgucgaagagacaaa

SEQ ID NO: 71105 - RNA, 23 nt, Artificial Sequence
  Chemically synthesized
aguuccuggugaauaucgaagaa

SEQ ID NO: 71106 - RNA, 23 nt, Artificial Sequence
  Chemically synthesized
gcuugaaagcgaugaagaauguc

SEQ ID NO: 71107 - RNA, 23 nt, Artificial Sequence
  Chemically synthesized
agcuugaaagcgaugaagaaugu

SEQ ID NO: 71108 - RNA, 23 nt, Artificial Sequence
  Chemically synthesized
uagcuugaaagcgaugaagaaug

SEQ ID NO: 71109 - RNA, 23 nt, Artificial Sequence
  Chemically synthesized
guagcuugaaagcgaugaagaau

SEQ ID NO: 71110 - RNA, 23 nt, Artificial Sequence
  Chemically synthesized
uguagcuugaaagcgaugaagaa

SEQ ID NO: 71111 - RNA, 23 nt, Artificial Sequence
  Chemically synthesized
gaagaagaaggcagcucuacagc

SEQ ID NO: 71112 - RNA, 23 nt, Artificial Sequence
  Chemically synthesized
augaugagcugcccaugaaagaa

SEQ ID NO: 71113 - RNA, 23 nt, Artificial Sequence
  Chemically synthesized
gaugaugagcugcccaugaaaga

SEQ ID NO: 71114 - RNA, 23 nt, Artificial Sequence
  Chemically synthesized
ugaugaugagcugcccaugaaag

SEQ ID NO: 71115 - RNA, 23 nt, Artificial Sequence
  Chemically synthesized
augaugaugagcugcccaugaaa

SEQ ID NO: 71116 - RNA, 23 nt, Artificial Sequence
  Chemically synthesized
ugguacaguuugguguaaaugua

SEQ ID NO: 71117 - RNA, 23 nt, Artificial Sequence
  Chemically synthesized
cugguacaguuugguguaaaugu

SEQ ID NO: 71118 - RNA, 23 nt, Artificial Sequence
  Chemically synthesized
ccugguacaguuugguguaaaug

SEQ ID NO: 71119 - RNA, 23 nt, Artificial Sequence
  Chemically synthesized
uccugguacaguuugguguaaau

SEQ ID NO: 71120 - RNA, 23 nt, Artificial Sequence
  Chemically synthesized
ccagagaacauuuauuccaauag

SEQ ID NO: 71121 - RNA, 23 nt, Artificial Sequence
  Chemically synthesized
cccagagaacauuuauuccaaua

SEQ ID NO: 71122 - RNA, 23 nt, Artificial Sequence
  Chemically synthesized
cuggaucaaguugaugauggaga

SEQ ID NO: 71123 - RNA, 23 nt, Artificial Sequence
  Chemically synthesized
ucuggaucaaguugaugauggag

SEQ ID NO: 71124 - RNA, 23 nt, Artificial Sequence
  Chemically synthesized
cucuggaucaaguugaugaugga

SEQ ID NO: 71125 - RNA, 23 nt, Artificial Sequence
  Chemically synthesized
gaucauagcugacuuuaaaaaca

SEQ ID NO: 71126 - RNA, 23 nt, Artificial Sequence
  Chemically synthesized
agaucauagcugacuuuaaaaac

SEQ ID NO: 71127 - RNA, 23 nt, Artificial Sequence
  Chemically synthesized
aagaucauagcugacuuuaaaaa

SEQ ID NO: 71128 - RNA, 23 nt, Artificial Sequence
  Chemically synthesized
caagaucauagcugacuuuaaaa

SEQ ID NO: 71129 - RNA, 23 nt, Artificial Sequence
  Chemically synthesized
ucaagaucauagcugacuuuaaa

SEQ ID NO: 71130 - RNA, 23 nt, Artificial Sequence
  Chemically synthesized
gaaacuugcuacagacuuacccg

SEQ ID NO: 71131 - RNA, 23 nt, Artificial Sequence
  Chemically synthesized
ccaaggcucugcuucuguaccuc

SEQ ID NO: 71132 - RNA, 23 nt, Artificial Sequence
  Chemically synthesized
gccaaggcucugcuucuguaccu

SEQ ID NO: 71133 - RNA, 23 nt, Artificial Sequence
  Chemically synthesized
agccaaggcucugcuucuguacc

SEQ ID NO: 71134 - RNA, 23 nt, Artificial Sequence
  Chemically synthesized
aagccaaggcucugcuucuguac

SEQ ID NO: 71135 - RNA, 23 nt, Artificial Sequence
  Chemically synthesized
caagccaaggcucugcuucugua

SEQ ID NO: 71136 - RNA, 23 nt, Artificial Sequence
  Chemically synthesized
gucaagaucauagcugacuuuaa

SEQ ID NO: 71137 - RNA, 23 nt, Artificial Sequence
  Chemically synthesized
gaugaagaaugucucuagaagag

SEQ ID NO: 71138 - RNA, 23 nt, Artificial Sequence
  Chemically synthesized
cgaugaagaaugucucuagaaga

SEQ ID NO: 71139 - RNA, 23 nt, Artificial Sequence
  Chemically synthesized
gcgaugaagaaugucucuagaag

SEQ ID NO: 71140 - RNA, 23 nt, Artificial Sequence
  Chemically synthesized
agcgaugaagaaugucucuagaa

SEQ ID NO: 71141 - RNA, 23 nt, Artificial Sequence
  Chemically synthesized
aagcgaugaagaaugucucuaga

SEQ ID NO: 71142 - RNA, 23 nt, Artificial Sequence
  Chemically synthesized
guaaaaggacaaacuugcguaaa

SEQ ID NO: 71143 - RNA, 23 nt, Artificial Sequence
  Chemically synthesized
gguaaaaggacaaacuugcguaa

SEQ ID NO: 71144 - RNA, 23 nt, Artificial Sequence
  Chemically synthesized
caaacuaaaggcucuaaaaucca

SEQ ID NO: 71145 - RNA, 23 nt, Artificial Sequence
  Chemically synthesized
acaaacuaaaggcucuaaaaucc

SEQ ID NO: 71146 - RNA, 23 nt, Artificial Sequence
  Chemically synthesized
cacaaacuaaaggcucuaaaauc

SEQ ID NO: 71147 - RNA, 23 nt, Artificial Sequence
  Chemically synthesized
ucacaaacuaaaggcucuaaaau

SEQ ID NO: 71148 - RNA, 23 nt, Artificial Sequence
  Chemically synthesized
uucacaaacuaaaggcucuaaaa

SEQ ID NO: 71149 - RNA, 23 nt, Artificial Sequence
  Chemically synthesized
ggcagcuagagaugcucaagaac

SEQ ID NO: 71150 - RNA, 23 nt, Artificial Sequence
  Chemically synthesized
aggcagcuagagaugcucaagaa

SEQ ID NO: 71151 - RNA, 23 nt, Artificial Sequence
  Chemically synthesized
caggcagcuagagaugcucaaga

SEQ ID NO: 71152 - RNA, 23 nt, Artificial Sequence
  Chemically synthesized
ccaggcagcuagagaugcucaag

SEQ ID NO: 71153 - RNA, 23 nt, Artificial Sequence
  Chemically synthesized
accaggcagcuagagaugcucaa

SEQ ID NO: 71154 - RNA, 23 nt, Artificial Sequence
  Chemically synthesized
guauauugucagugaagaacugu

SEQ ID NO: 71155 - RNA, 23 nt, Artificial Sequence
  Chemically synthesized
uguauauugucagugaagaacug

SEQ ID NO: 71156 - RNA, 23 nt, Artificial Sequence
  Chemically synthesized
uuguauauugucagugaagaacu

SEQ ID NO: 71157 - RNA, 23 nt, Artificial Sequence
  Chemically synthesized
ccguguagcacucagauaaguau

SEQ ID NO: 71158 - RNA, 23 nt, Artificial Sequence
  Chemically synthesized
cccguguagcacucagauaagua

SEQ ID NO: 71159 - RNA, 23 nt, Artificial Sequence
  Chemically synthesized
ucccguguagcacucagauaagu

SEQ ID NO: 71160 - RNA, 23 nt, Artificial Sequence
  Chemically synthesized
gucccguguagcacucagauaag

SEQ ID NO: 71161 - RNA, 23 nt, Artificial Sequence
  Chemically synthesized
ugucccguguagcacucagauaa

SEQ ID NO: 71162 - RNA, 23 nt, Artificial Sequence
  Chemically synthesized
ccagaauaacccagaagaaccaa

SEQ ID NO: 71163 - RNA, 23 nt, Artificial Sequence
  Chemically synthesized
uccagaauaacccagaagaacca

SEQ ID NO: 71164 - RNA, 23 nt, Artificial Sequence
  Chemically synthesized
cuccagaauaacccagaagaacc

SEQ ID NO: 71165 - RNA, 23 nt, Artificial Sequence
  Chemically synthesized
ucuccagaauaacccagaagaac

SEQ ID NO: 71166 - RNA, 23 nt, Artificial Sequence
  Chemically synthesized
aucuccagaauaacccagaagaa

SEQ ID NO: 71167 - RNA, 23 nt, Artificial Sequence
  Chemically synthesized
gggaugcucagguugcaaauaaa

SEQ ID NO: 71168 - RNA, 23 nt, Artificial Sequence
  Chemically synthesized
ccaagaucucaggauccaaguuu

SEQ ID NO: 71169 - RNA, 23 nt, Artificial Sequence
  Chemically synthesized
accaagaucucaggauccaaguu

SEQ ID NO: 71170 - RNA, 23 nt, Artificial Sequence
  Chemically synthesized
gaccaagaucucaggauccaagu

SEQ ID NO: 71171 - RNA, 23 nt, Artificial Sequence
  Chemically synthesized
ggaccaagaucucaggauccaag

SEQ ID NO: 71172 - RNA, 23 nt, Artificial Sequence
  Chemically synthesized
uggaccaagaucucaggauccaa

SEQ ID NO: 71173 - RNA, 23 nt, Artificial Sequence
  Chemically synthesized
cauugugcugccucauguaacaa

SEQ ID NO: 71174 - RNA, 23 nt, Artificial Sequence
  Chemically synthesized
acauugugcugccucauguaaca

SEQ ID NO: 71175 - RNA, 23 nt, Artificial Sequence
  Chemically synthesized
uacauugugcugccucauguaac

SEQ ID NO: 71176 - RNA, 23 nt, Artificial Sequence
  Chemically synthesized
uuacauugugcugccucauguaa

SEQ ID NO: 71177 - RNA, 23 nt, Artificial Sequence
  Chemically synthesized
auuacauugugcugccucaugua

SEQ ID NO: 71178 - RNA, 23 nt, Artificial Sequence
  Chemically synthesized
ggauaaugagcgaauguuugaug

SEQ ID NO: 71179 - RNA, 23 nt, Artificial Sequence
  Chemically synthesized
aggagaacgguguuaauaguccu

SEQ ID NO: 71180 - RNA, 23 nt, Artificial Sequence
  Chemically synthesized
aaggagaacgguguuaauagucc

SEQ ID NO: 71181 - RNA, 23 nt, Artificial Sequence
  Chemically synthesized
aaaggagaacgguguuaauaguc

SEQ ID NO: 71182 - RNA, 23 nt, Artificial Sequence
  Chemically synthesized
gaaaggagaacgguguuaauagu

SEQ ID NO: 71183 - RNA, 23 nt, Artificial Sequence
  Chemically synthesized
aaguuccuggugaauaucgaaga

SEQ ID NO: 71184 - RNA, 23 nt, Artificial Sequence
  Chemically synthesized
aaaguuccuggugaauaucgaag

SEQ ID NO: 71185 - RNA, 23 nt, Artificial Sequence
  Chemically synthesized
aaaaguuccuggugaauaucgaa

SEQ ID NO: 71186 - RNA, 23 nt, Artificial Sequence
  Chemically synthesized
gaagaaugucucuagaagagaau

SEQ ID NO: 71187 - RNA, 23 nt, Artificial Sequence
  Chemically synthesized
ugaagaaugucucuagaagagaa

SEQ ID NO: 71188 - RNA, 23 nt, Artificial Sequence
  Chemically synthesized
augaagaaugucucuagaagaga

SEQ ID NO: 71189 - RNA, 23 nt, Artificial Sequence
  Chemically synthesized
caauguagcuugaaagcgaugaa

SEQ ID NO: 71190 - RNA, 23 nt, Artificial Sequence
  Chemically synthesized
acaauguagcuugaaagcgauga

SEQ ID NO: 71191 - RNA, 23 nt, Artificial Sequence
  Chemically synthesized
gacaauguagcuugaaagcgaug

SEQ ID NO: 71192 - RNA, 23 nt, Artificial Sequence
  Chemically synthesized
aucauacccauccaagucagcuu

SEQ ID NO: 71193 - RNA, 23 nt, Artificial Sequence
  Chemically synthesized
caucauacccauccaagucagcu

SEQ ID NO: 71194 - RNA, 23 nt, Artificial Sequence
  Chemically synthesized
cuuccacccuucagaaaacccca

SEQ ID NO: 71195 - RNA, 23 nt, Artificial Sequence
  Chemically synthesized
ugcugcuaucucccagcauaccu

SEQ ID NO: 71196 - RNA, 23 nt, Artificial Sequence
  Chemically synthesized
gugcugcuaucucccagcauacc

SEQ ID NO: 71197 - RNA, 23 nt, Artificial Sequence
  Chemically synthesized
agugcugcuaucucccagcauac

SEQ ID NO: 71198 - RNA, 23 nt, Artificial Sequence
  Chemically synthesized
gagugcugcuaucucccagcaua

SEQ ID NO: 71199 - RNA, 23 nt, Artificial Sequence
  Chemically synthesized
ccaagaugaugccgauguuucuu

SEQ ID NO: 71200 - RNA, 23 nt, Artificial Sequence
  Chemically synthesized
uccaagaugaugccgauguuucu

SEQ ID NO: 71201 - RNA, 23 nt, Artificial Sequence
  Chemically synthesized
guccaagaugaugccgauguuuc

SEQ ID NO: 71202 - RNA, 23 nt, Artificial Sequence
  Chemically synthesized
cgggaugcucagguugcaaauaa

SEQ ID NO: 71203 - RNA, 23 nt, Artificial Sequence
  Chemically synthesized
gcgggaugcucagguugcaaaua

SEQ ID NO: 71204 - RNA, 23 nt, Artificial Sequence
  Chemically synthesized
ugcgggaugcucagguugcaaau

SEQ ID NO: 71205 - RNA, 23 nt, Artificial Sequence
  Chemically synthesized
aagaaggcagcucuacagcaaaa

SEQ ID NO: 71206 - RNA, 23 nt, Artificial Sequence
  Chemically synthesized
gaagaaggcagcucuacagcaaa

SEQ ID NO: 71207 - RNA, 23 nt, Artificial Sequence
  Chemically synthesized
agaagaaggcagcucuacagcaa

SEQ ID NO: 71208 - RNA, 23 nt, Artificial Sequence
  Chemically synthesized
gaguuuuuguagcaucuuaagaa

SEQ ID NO: 71209 - RNA, 23 nt, Artificial Sequence
  Chemically synthesized
ugaguuuuuguagcaucuuaaga

SEQ ID NO: 71210 - RNA, 23 nt, Artificial Sequence
  Chemically synthesized
augaguuuuuguagcaucuuaag

SEQ ID NO: 71211 - RNA, 23 nt, Artificial Sequence
  Chemically synthesized
uaugaguuuuuguagcaucuuaa

SEQ ID NO: 71212 - RNA, 23 nt, Artificial Sequence
  Chemically synthesized
auaugaguuuuuguagcaucuua

SEQ ID NO: 71213 - RNA, 23 nt, Artificial Sequence
  Chemically synthesized
gaaugucucuagaagagaaugaa

SEQ ID NO: 71214 - RNA, 23 nt, Artificial Sequence
  Chemically synthesized
agaaugucucuagaagagaauga

SEQ ID NO: 71215 - RNA, 23 nt, Artificial Sequence
  Chemically synthesized
aagaaugucucuagaagagaaug

SEQ ID NO: 71216 - RNA, 23 nt, Artificial Sequence
  Chemically synthesized
aagacaaaggagcuuggccugaa

SEQ ID NO: 71217 - RNA, 23 nt, Artificial Sequence
  Chemically synthesized
ugcugggacuguacccaagaauu

SEQ ID NO: 71218 - RNA, 23 nt, Artificial Sequence
  Chemically synthesized
gagacugcaugacaaucauccac

SEQ ID NO: 71219 - RNA, 23 nt, Artificial Sequence
  Chemically synthesized
ggagacugcaugacaaucaucca

SEQ ID NO: 71220 - RNA, 23 nt, Artificial Sequence
  Chemically synthesized
aggagacugcaugacaaucaucc

SEQ ID NO: 71221 - RNA, 23 nt, Artificial Sequence
  Chemically synthesized
aaggagacugcaugacaaucauc

SEQ ID NO: 71222 - RNA, 23 nt, Artificial Sequence
  Chemically synthesized
ugcgcuuugggauuaugaaccuc

SEQ ID NO: 71223 - RNA, 23 nt, Artificial Sequence
  Chemically synthesized
augcgcuuugggauuaugaaccu

SEQ ID NO: 71224 - RNA, 23 nt, Artificial Sequence
  Chemically synthesized
uaugcgcuuugggauuaugaacc

SEQ ID NO: 71225 - RNA, 23 nt, Artificial Sequence
  Chemically synthesized
guuuguaggcugaauuuuaaucu

SEQ ID NO: 71226 - RNA, 23 nt, Artificial Sequence
  Chemically synthesized
uguuuguaggcugaauuuuaauc

SEQ ID NO: 71227 - RNA, 23 nt, Artificial Sequence
  Chemically synthesized
uuguuuguaggcugaauuuuaau

SEQ ID NO: 71228 - RNA, 23 nt, Artificial Sequence
  Chemically synthesized
gggcgcgccuuaaugauaaggag

SEQ ID NO: 71229 - RNA, 23 nt, Artificial Sequence
  Chemically synthesized
ugggcgcgccuuaaugauaagga

SEQ ID NO: 71230 - RNA, 23 nt, Artificial Sequence
  Chemically synthesized
gugggcgcgccuuaaugauaagg

SEQ ID NO: 71231 - RNA, 23 nt, Artificial Sequence
  Chemically synthesized
ggugggcgcgccuuaaugauaag

SEQ ID NO: 71232 - RNA, 23 nt, Artificial Sequence
  Chemically synthesized
uggugggcgcgccuuaaugauaa

SEQ ID NO: 71233 - RNA, 23 nt, Artificial Sequence
  Chemically synthesized
ugcugcagauaagugcgaggaaa

SEQ ID NO: 71234 - RNA, 23 nt, Artificial Sequence
  Chemically synthesized
guggucucucugguuccugaauc

SEQ ID NO: 71235 - RNA, 23 nt, Artificial Sequence
  Chemically synthesized
gguggucucucugguuccugaau

SEQ ID NO: 71236 - RNA, 23 nt, Artificial Sequence
  Chemically synthesized
agguggucucucugguuccugaa

SEQ ID NO: 71237 - RNA, 23 nt, Artificial Sequence
  Chemically synthesized
gccacucagcccaacuaaauuac

SEQ ID NO: 71238 - RNA, 23 nt, Artificial Sequence
  Chemically synthesized
ggccacucagcccaacuaaauua

SEQ ID NO: 71239 - RNA, 23 nt, Artificial Sequence
  Chemically synthesized
cggccacucagcccaacuaaauu

SEQ ID NO: 71240 - RNA, 23 nt, Artificial Sequence
  Chemically synthesized
ucggccacucagcccaacuaaau

SEQ ID NO: 71241 - RNA, 23 nt, Artificial Sequence
  Chemically synthesized
cucggccacucagcccaacuaaa

SEQ ID NO: 71242 - RNA, 23 nt, Artificial Sequence
  Chemically synthesized
ccagguucuaagcaagaaagucc

SEQ ID NO: 71243 - RNA, 23 nt, Artificial Sequence
  Chemically synthesized
uccagguucuaagcaagaaaguc

SEQ ID NO: 71244 - RNA, 23 nt, Artificial Sequence
  Chemically synthesized
cuccagguucuaagcaagaaagu

SEQ ID NO: 71245 - RNA, 23 nt, Artificial Sequence
  Chemically synthesized
ucuccagguucuaagcaagaaag

SEQ ID NO: 71246 - RNA, 23 nt, Artificial Sequence
  Chemically synthesized
gcugcaguaggucccuauaucca

SEQ ID NO: 71247 - RNA, 23 nt, Artificial Sequence
  Chemically synthesized
ggcugcaguaggucccuauaucc

SEQ ID NO: 71248 - RNA, 23 nt, Artificial Sequence
  Chemically synthesized
uggcugcaguaggucccuauauc

SEQ ID NO: 71249 - RNA, 23 nt, Artificial Sequence
  Chemically synthesized
guggcugcaguaggucccuauau

SEQ ID NO: 71250 - RNA, 23 nt, Artificial Sequence
  Chemically synthesized
uguggcugcaguaggucccuaua

SEQ ID NO: 71251 - RNA, 23 nt, Artificial Sequence
  Chemically synthesized
agagcagaaugccaagcuacaac

SEQ ID NO: 71252 - RNA, 23 nt, Artificial Sequence
  Chemically synthesized
aagagcagaaugccaagcuacaa

SEQ ID NO: 71253 - RNA, 23 nt, Artificial Sequence
  Chemically synthesized
caagagcagaaugccaagcuaca

SEQ ID NO: 71254 - RNA, 23 nt, Artificial Sequence
  Chemically synthesized
ucaagagcagaaugccaagcuac

SEQ ID NO: 71255 - RNA, 23 nt, Artificial Sequence
  Chemically synthesized
aucaagagcagaaugccaagcua

SEQ ID NO: 71256 - RNA, 23 nt, Artificial Sequence
  Chemically synthesized
aaaggccacguggaacagaagag

SEQ ID NO: 71257 - RNA, 23 nt, Artificial Sequence
  Chemically synthesized
uaaaggccacguggaacagaaga

SEQ ID NO: 71258 - RNA, 23 nt, Artificial Sequence
  Chemically synthesized
uuaaaggccacguggaacagaag

SEQ ID NO: 71259 - RNA, 23 nt, Artificial Sequence
  Chemically synthesized
cuuaaaggccacguggaacagaa

SEQ ID NO: 71260 - RNA, 23 nt, Artificial Sequence
  Chemically synthesized
agaucagcgacaacagcaacaag

SEQ ID NO: 71261 - RNA, 23 nt, Artificial Sequence
  Chemically synthesized
aagaucagcgacaacagcaacaa

SEQ ID NO: 71262 - RNA, 23 nt, Artificial Sequence
  Chemically synthesized
caagaucagcgacaacagcaaca

SEQ ID NO: 71263 - RNA, 23 nt, Artificial Sequence
  Chemically synthesized
acaagaucagcgacaacagcaac

SEQ ID NO: 71264 - RNA, 23 nt, Artificial Sequence
  Chemically synthesized
aacaagaucagcgacaacagcaa

SEQ ID NO: 71265 - RNA, 23 nt, Artificial Sequence
  Chemically synthesized
caugcagacugcugcagauaagu

SEQ ID NO: 71266 - RNA, 23 nt, Artificial Sequence
  Chemically synthesized
acaugcagacugcugcagauaag

SEQ ID NO: 71267 - RNA, 23 nt, Artificial Sequence
  Chemically synthesized
gacaugcagacugcugcagauaa

SEQ ID NO: 71268 - RNA, 23 nt, Artificial Sequence
  Chemically synthesized
ugacaugcagacugcugcagaua

SEQ ID NO: 71269 - RNA, 23 nt, Artificial Sequence
  Chemically synthesized
gugacaugcagacugcugcagau

SEQ ID NO: 71270 - RNA, 23 nt, Artificial Sequence
  Chemically synthesized
acuuaaaggccacguggaacaga

SEQ ID NO: 71271 - RNA, 23 nt, Artificial Sequence
  Chemically synthesized
cacuuaaaggccacguggaacag

SEQ ID NO: 71272 - RNA, 23 nt, Artificial Sequence
  Chemically synthesized
gcacuuaaaggccacguggaaca

SEQ ID NO: 71273 - RNA, 23 nt, Artificial Sequence
  Chemically synthesized
agcacuuaaaggccacguggaac

SEQ ID NO: 71274 - RNA, 23 nt, Artificial Sequence
  Chemically synthesized
gagcacuuaaaggccacguggaa

SEQ ID NO: 71275 - RNA, 23 nt, Artificial Sequence
  Chemically synthesized
aaaagugagagcacuuaaaggcc

SEQ ID NO: 71276 - RNA, 23 nt, Artificial Sequence
  Chemically synthesized
aaaaagugagagcacuuaaaggc

SEQ ID NO: 71277 - RNA, 23 nt, Artificial Sequence
  Chemically synthesized
aaaaaagugagagcacuuaaagg

SEQ ID NO: 71278 - RNA, 23 nt, Artificial Sequence
  Chemically synthesized
aaaaaaagugagagcacuuaaag

SEQ ID NO: 71279 - RNA, 23 nt, Artificial Sequence
  Chemically synthesized
uaaaaaaagugagagcacuuaaa

SEQ ID NO: 71280 - RNA, 23 nt, Artificial Sequence
  Chemically synthesized
ggcaguccagaaccugaaacaga

SEQ ID NO: 71281 - RNA, 23 nt, Artificial Sequence
  Chemically synthesized
uggcaguccagaaccugaaacag

SEQ ID NO: 71282 - RNA, 23 nt, Artificial Sequence
  Chemically synthesized
cuggcaguccagaaccugaaaca

SEQ ID NO: 71283 - RNA, 23 nt, Artificial Sequence
  Chemically synthesized
ccuggcaguccagaaccugaaac

SEQ ID NO: 71284 - RNA, 23 nt, Artificial Sequence
  Chemically synthesized
gccuggcaguccagaaccugaaa

SEQ ID NO: 71285 - RNA, 23 nt, Artificial Sequence
  Chemically synthesized
aagaagaaggcagcucuacagca

SEQ ID NO: 71286 - RNA, 23 nt, Artificial Sequence
  Chemically synthesized
aaggagcugcagcuaagaaacaa

SEQ ID NO: 71287 - RNA, 23 nt, Artificial Sequence
  Chemically synthesized
uaaggagcugcagcuaagaaaca

SEQ ID NO: 71288 - RNA, 23 nt, Artificial Sequence
  Chemically synthesized
auaaggagcugcagcuaagaaac

SEQ ID NO: 71289 - RNA, 23 nt, Artificial Sequence
  Chemically synthesized
uauaaggagcugcagcuaagaaa

SEQ ID NO: 71290 - RNA, 23 nt, Artificial Sequence
  Chemically synthesized
gguucggguccaagaugaugccg

SEQ ID NO: 71291 - RNA, 23 nt, Artificial Sequence
  Chemically synthesized
cgguucggguccaagaugaugcc

SEQ ID NO: 71292 - RNA, 23 nt, Artificial Sequence
  Chemically synthesized
gcgguucggguccaagaugaugc

SEQ ID NO: 71293 - RNA, 23 nt, Artificial Sequence
  Chemically synthesized
ugcgguucggguccaagaugaug

SEQ ID NO: 71294 - RNA, 23 nt, Artificial Sequence
  Chemically synthesized
augcgguucggguccaagaugau

SEQ ID NO: 71295 - RNA, 23 nt, Artificial Sequence
  Chemically synthesized
augccgauguuucuuaccgugua

SEQ ID NO: 71296 - RNA, 23 nt, Artificial Sequence
  Chemically synthesized
aucauccacagggaagacgaaga

SEQ ID NO: 71297 - RNA, 23 nt, Artificial Sequence
  Chemically synthesized
aaucauccacagggaagacgaag

SEQ ID NO: 71298 - RNA, 23 nt, Artificial Sequence
  Chemically synthesized
caaucauccacagggaagacgaa

SEQ ID NO: 71299 - RNA, 23 nt, Artificial Sequence
  Chemically synthesized
gcagggacauugugaguggacca

SEQ ID NO: 71300 - RNA, 23 nt, Artificial Sequence
  Chemically synthesized
gcaucacggcucuucacaaugcu

SEQ ID NO: 71301 - RNA, 23 nt, Artificial Sequence
  Chemically synthesized
ggcaucacggcucuucacaaugc

SEQ ID NO: 71302 - RNA, 23 nt, Artificial Sequence
  Chemically synthesized
aggcaucacggcucuucacaaug

SEQ ID NO: 71303 - RNA, 23 nt, Artificial Sequence
  Chemically synthesized
aaggcaucacggcucuucacaau

SEQ ID NO: 71304 - RNA, 23 nt, Artificial Sequence
  Chemically synthesized
gaaggcaucacggcucuucacaa

SEQ ID NO: 71305 - RNA, 23 nt, Artificial Sequence
  Chemically synthesized
cucucugccuccugguaaaagga

SEQ ID NO: 71306 - RNA, 23 nt, Artificial Sequence
  Chemically synthesized
ucucucugccuccugguaaaagg

SEQ ID NO: 71307 - RNA, 23 nt, Artificial Sequence
  Chemically synthesized
gucucucugccuccugguaaaag

SEQ ID NO: 71308 - RNA, 23 nt, Artificial Sequence
  Chemically synthesized
ggucucucugccuccugguaaaa

SEQ ID NO: 71309 - RNA, 23 nt, Artificial Sequence
  Chemically synthesized
aggucucucugccuccugguaaa

SEQ ID NO: 71310 - RNA, 23 nt, Artificial Sequence
  Chemically synthesized
gugacugccagcucagaaagccc

SEQ ID NO: 71311 - RNA, 23 nt, Artificial Sequence
  Chemically synthesized
ugugacugccagcucagaaagcc

SEQ ID NO: 71312 - RNA, 23 nt, Artificial Sequence
  Chemically synthesized
cugugacugccagcucagaaagc

SEQ ID NO: 71313 - RNA, 23 nt, Artificial Sequence
  Chemically synthesized
ucugugacugccagcucagaaag

SEQ ID NO: 71314 - RNA, 23 nt, Artificial Sequence
  Chemically synthesized
uucugugacugccagcucagaaa

SEQ ID NO: 71315 - RNA, 23 nt, Artificial Sequence
  Chemically synthesized
aacgcaccaaggccucuaaagaa

SEQ ID NO: 71316 - RNA, 23 nt, Artificial Sequence
  Chemically synthesized
uaacgcaccaaggccucuaaaga

SEQ ID NO: 71317 - RNA, 23 nt, Artificial Sequence
  Chemically synthesized
uugcgggaugcucagguugcaaa

SEQ ID NO: 71318 - RNA, 23 nt, Artificial Sequence
  Chemically synthesized
gcuacagacuuacccguaauauu

SEQ ID NO: 71319 - RNA, 23 nt, Artificial Sequence
  Chemically synthesized
ugcuacagacuuacccguaauau

SEQ ID NO: 71320 - RNA, 23 nt, Artificial Sequence
  Chemically synthesized
uugcuacagacuuacccguaaua

SEQ ID NO: 71321 - RNA, 23 nt, Artificial Sequence
  Chemically synthesized
cuugcuacagacuuacccguaau

SEQ ID NO: 71322 - RNA, 23 nt, Artificial Sequence
  Chemically synthesized
acuugcuacagacuuacccguaa

SEQ ID NO: 71323 - RNA, 23 nt, Artificial Sequence
  Chemically synthesized
augaaggauugaagaauucacca

SEQ ID NO: 71324 - RNA, 23 nt, Artificial Sequence
  Chemically synthesized
aaugaaggauugaagaauucacc

SEQ ID NO: 71325 - RNA, 23 nt, Artificial Sequence
  Chemically synthesized
cuguguuugccaugaccuacagu

SEQ ID NO: 71326 - RNA, 23 nt, Artificial Sequence
  Chemically synthesized
gcuguguuugccaugaccuacag

SEQ ID NO: 71327 - RNA, 23 nt, Artificial Sequence
  Chemically synthesized
cgcuguguuugccaugaccuaca

SEQ ID NO: 71328 - RNA, 23 nt, Artificial Sequence
  Chemically synthesized
ccgcuguguuugccaugaccuac

SEQ ID NO: 71329 - RNA, 23 nt, Artificial Sequence
  Chemically synthesized
gccgcuguguuugccaugaccua

SEQ ID NO: 71330 - RNA, 23 nt, Artificial Sequence
  Chemically synthesized
cuucuuccuucgucaugaacgcc

SEQ ID NO: 71331 - RNA, 23 nt, Artificial Sequence
  Chemically synthesized
gcuucuuccuucgucaugaacgc

SEQ ID NO: 71332 - RNA, 23 nt, Artificial Sequence
  Chemically synthesized
cgcuucuuccuucgucaugaacg

SEQ ID NO: 71333 - RNA, 23 nt, Artificial Sequence
  Chemically synthesized
ucgcuucuuccuucgucaugaac

SEQ ID NO: 71334 - RNA, 23 nt, Artificial Sequence
  Chemically synthesized
uucgcuucuuccuucgucaugaa

SEQ ID NO: 71335 - RNA, 23 nt, Artificial Sequence
  Chemically synthesized
gccuccugguaaaaggacaaacu

SEQ ID NO: 71336 - RNA, 23 nt, Artificial Sequence
  Chemically synthesized
ugccuccugguaaaaggacaaac

SEQ ID NO: 71337 - RNA, 23 nt, Artificial Sequence
  Chemically synthesized
cugccuccugguaaaaggacaaa

SEQ ID NO: 71338 - RNA, 23 nt, Artificial Sequence
  Chemically synthesized
ucugccuccugguaaaaggacaa

SEQ ID NO: 71339 - RNA, 23 nt, Artificial Sequence
  Chemically synthesized
aguucucagcaguugucaacagu

SEQ ID NO: 71340 - RNA, 23 nt, Artificial Sequence
  Chemically synthesized
aaguucucagcaguugucaacag

SEQ ID NO: 71341 - RNA, 23 nt, Artificial Sequence
  Chemically synthesized
gaaguucucagcaguugucaaca

SEQ ID NO: 71342 - RNA, 23 nt, Artificial Sequence
  Chemically synthesized
ggaaguucucagcaguugucaac

SEQ ID NO: 71343 - RNA, 23 nt, Artificial Sequence
  Chemically synthesized
cugaggaagaaccagagcaguga

SEQ ID NO: 71344 - RNA, 23 nt, Artificial Sequence
  Chemically synthesized
uaaaaguuccuggugaauaucga

SEQ ID NO: 71345 - RNA, 23 nt, Artificial Sequence
  Chemically synthesized
guaacuugcugggacuguaccca

SEQ ID NO: 71346 - RNA, 23 nt, Artificial Sequence
  Chemically synthesized
cguaacuugcugggacuguaccc

SEQ ID NO: 71347 - RNA, 23 nt, Artificial Sequence
  Chemically synthesized
acguaacuugcugggacuguacc

SEQ ID NO: 71348 - RNA, 23 nt, Artificial Sequence
  Chemically synthesized
cagaagaaccaaauccagaggcu

SEQ ID NO: 71349 - RNA, 23 nt, Artificial Sequence
  Chemically synthesized
ccagaagaaccaaauccagaggc

SEQ ID NO: 71350 - RNA, 23 nt, Artificial Sequence
  Chemically synthesized
gauuuggaagucagaggaacgaa

SEQ ID NO: 71351 - RNA, 23 nt, Artificial Sequence
  Chemically synthesized
aaccagagugaugcugaccuaga

SEQ ID NO: 71352 - RNA, 23 nt, Artificial Sequence
  Chemically synthesized
aaaccagagugaugcugaccuag

SEQ ID NO: 71353 - RNA, 23 nt, Artificial Sequence
  Chemically synthesized
gaaaccagagugaugcugaccua

SEQ ID NO: 71354 - RNA, 23 nt, Artificial Sequence
  Chemically synthesized
ucuuuggagggagaauuugaccu

SEQ ID NO: 71355 - RNA, 23 nt, Artificial Sequence
  Chemically synthesized
guucuucaacgauuuggaaguca

SEQ ID NO: 71356 - RNA, 23 nt, Artificial Sequence
  Chemically synthesized
uguucuucaacgauuuggaaguc

SEQ ID NO: 71357 - RNA, 23 nt, Artificial Sequence
  Chemically synthesized
auguucuucaacgauuuggaagu

SEQ ID NO: 71358 - RNA, 23 nt, Artificial Sequence
  Chemically synthesized
gauguucuucaacgauuuggaag

SEQ ID NO: 71359 - RNA, 23 nt, Artificial Sequence
  Chemically synthesized
ugauguucuucaacgauuuggaa

SEQ ID NO: 71360 - RNA, 23 nt, Artificial Sequence
  Chemically synthesized
gguccuaaugggccaaauauuca

SEQ ID NO: 71361 - RNA, 23 nt, Artificial Sequence
  Chemically synthesized
ggguccuaaugggccaaauauuc

SEQ ID NO: 71362 - RNA, 23 nt, Artificial Sequence
  Chemically synthesized
aggguccuaaugggccaaauauu

SEQ ID NO: 71363 - RNA, 23 nt, Artificial Sequence
  Chemically synthesized
gaggguccuaaugggccaaauau

SEQ ID NO: 71364 - RNA, 23 nt, Artificial Sequence
  Chemically synthesized
agaggguccuaaugggccaaaua

SEQ ID NO: 71365 - RNA, 23 nt, Artificial Sequence
  Chemically synthesized
ccuguuccuacaaaaccaaaaca

SEQ ID NO: 71366 - RNA, 23 nt, Artificial Sequence
  Chemically synthesized
uccuguuccuacaaaaccaaaac

SEQ ID NO: 71367 - RNA, 23 nt, Artificial Sequence
  Chemically synthesized
cuccuguuccuacaaaaccaaaa

SEQ ID NO: 71368 - RNA, 23 nt, Artificial Sequence
  Chemically synthesized
ccuccuguuccuacaaaaccaaa

SEQ ID NO: 71369 - RNA, 23 nt, Artificial Sequence
  Chemically synthesized
accuccuguuccuacaaaaccaa

SEQ ID NO: 71370 - RNA, 23 nt, Artificial Sequence
  Chemically synthesized
gggaaacuuguggaggaaauuga

SEQ ID NO: 71371 - RNA, 23 nt, Artificial Sequence
  Chemically synthesized
aacaaugagcagcacuucacaga

SEQ ID NO: 71372 - RNA, 23 nt, Artificial Sequence
  Chemically synthesized
uaacaaugagcagcacuucacag

SEQ ID NO: 71373 - RNA, 23 nt, Artificial Sequence
  Chemically synthesized
auguagcuugaaagcgaugaaga

SEQ ID NO: 71374 - RNA, 23 nt, Artificial Sequence
  Chemically synthesized
aauguagcuugaaagcgaugaag

SEQ ID NO: 71375 - RNA, 23 nt, Artificial Sequence
  Chemically synthesized
uuuuaaugacaauguagcuugaa

SEQ ID NO: 71376 - RNA, 23 nt, Artificial Sequence
  Chemically synthesized
auuuuaaugacaauguagcuuga

SEQ ID NO: 71377 - RNA, 23 nt, Artificial Sequence
  Chemically synthesized
aauugaaucaagagcagaaugcc

SEQ ID NO: 71378 - RNA, 23 nt, Artificial Sequence
  Chemically synthesized
aaauugaaucaagagcagaaugc

SEQ ID NO: 71379 - RNA, 23 nt, Artificial Sequence
  Chemically synthesized
ccaugacaaucagucugcagugg

SEQ ID NO: 71380 - RNA, 23 nt, Artificial Sequence
  Chemically synthesized
accaugacaaucagucugcagug

SEQ ID NO: 71381 - RNA, 23 nt, Artificial Sequence
  Chemically synthesized
caccaugacaaucagucugcagu

SEQ ID NO: 71382 - RNA, 23 nt, Artificial Sequence
  Chemically synthesized
ccaccaugacaaucagucugcag

SEQ ID NO: 71383 - RNA, 23 nt, Artificial Sequence
  Chemically synthesized
gccaccaugacaaucagucugca

SEQ ID NO: 71384 - RNA, 23 nt, Artificial Sequence
  Chemically synthesized
caaguugcugagcaggagaaacu

SEQ ID NO: 71385 - RNA, 23 nt, Artificial Sequence
  Chemically synthesized
acaaguugcugagcaggagaaac

SEQ ID NO: 71386 - RNA, 23 nt, Artificial Sequence
  Chemically synthesized
aacaaguugcugagcaggagaaa

SEQ ID NO: 71387 - RNA, 23 nt, Artificial Sequence
  Chemically synthesized
caacaaguugcugagcaggagaa

SEQ ID NO: 71388 - RNA, 23 nt, Artificial Sequence
  Chemically synthesized
gcaacaaguugcugagcaggaga

SEQ ID NO: 71389 - RNA, 23 nt, Artificial Sequence
  Chemically synthesized
gauugaagcccagcaacaauugc

SEQ ID NO: 71390 - RNA, 23 nt, Artificial Sequence
  Chemically synthesized
agauugaagcccagcaacaauug

SEQ ID NO: 71391 - RNA, 23 nt, Artificial Sequence
  Chemically synthesized
cagauugaagcccagcaacaauu

SEQ ID NO: 71392 - RNA, 23 nt, Artificial Sequence
  Chemically synthesized
ccugaaacuuccacacagaauuu

SEQ ID NO: 71393 - RNA, 23 nt, Artificial Sequence
  Chemically synthesized
gccugaaacuuccacacagaauu

SEQ ID NO: 71394 - RNA, 23 nt, Artificial Sequence
  Chemically synthesized
ggccugaaacuuccacacagaau

SEQ ID NO: 71395 - RNA, 23 nt, Artificial Sequence
  Chemically synthesized
uggccugaaacuuccacacagaa

SEQ ID NO: 71396 - RNA, 23 nt, Artificial Sequence
  Chemically synthesized
uuggccugaaacuuccacacaga

SEQ ID NO: 71397 - RNA, 23 nt, Artificial Sequence
  Chemically synthesized
agagaacagugacaugccagcuc

SEQ ID NO: 71398 - RNA, 23 nt, Artificial Sequence
  Chemically synthesized
cagagaacagugacaugccagcu

SEQ ID NO: 71399 - RNA, 23 nt, Artificial Sequence
  Chemically synthesized
acagagaacagugacaugccagc

SEQ ID NO: 71400 - RNA, 23 nt, Artificial Sequence
  Chemically synthesized
uacagagaacagugacaugccag

SEQ ID NO: 71401 - RNA, 23 nt, Artificial Sequence
  Chemically synthesized
guacagagaacagugacaugcca

SEQ ID NO: 71402 - RNA, 23 nt, Artificial Sequence
  Chemically synthesized
gaccuagaagccuuacgaaagaa

SEQ ID NO: 71403 - RNA, 23 nt, Artificial Sequence
  Chemically synthesized
ugaccuagaagccuuacgaaaga

SEQ ID NO: 71404 - RNA, 23 nt, Artificial Sequence
  Chemically synthesized
ccauguauacgcaacagcaggcg

SEQ ID NO: 71405 - RNA, 23 nt, Artificial Sequence
  Chemically synthesized
uccauguauacgcaacagcaggc

SEQ ID NO: 71406 - RNA, 23 nt, Artificial Sequence
  Chemically synthesized
uuccauguauacgcaacagcagg

SEQ ID NO: 71407 - RNA, 23 nt, Artificial Sequence
  Chemically synthesized
auuccauguauacgcaacagcag

SEQ ID NO: 71408 - RNA, 23 nt, Artificial Sequence
  Chemically synthesized
uauuccauguauacgcaacagca

SEQ ID NO: 71409 - RNA, 23 nt, Artificial Sequence
  Chemically synthesized
agaaagugcguccguucucaaug

SEQ ID NO: 71410 - RNA, 23 nt, Artificial Sequence
  Chemically synthesized
aagaaagugcguccguucucaau

SEQ ID NO: 71411 - RNA, 23 nt, Artificial Sequence
  Chemically synthesized
gaagaaagugcguccguucucaa

SEQ ID NO: 71412 - RNA, 23 nt, Artificial Sequence
  Chemically synthesized
agaucuuuucccaagccaaggcu

SEQ ID NO: 71413 - RNA, 23 nt, Artificial Sequence
  Chemically synthesized
cagaucuuuucccaagccaaggc

SEQ ID NO: 71414 - RNA, 23 nt, Artificial Sequence
  Chemically synthesized
gcagaucuuuucccaagccaagg

SEQ ID NO: 71415 - RNA, 23 nt, Artificial Sequence
  Chemically synthesized
ugcagaucuuuucccaagccaag

SEQ ID NO: 71416 - RNA, 23 nt, Artificial Sequence
  Chemically synthesized
augcagaucuuuucccaagccaa

SEQ ID NO: 71417 - RNA, 23 nt, Artificial Sequence
  Chemically synthesized
agcugagaaucaggaagcuaagc

SEQ ID NO: 71418 - RNA, 23 nt, Artificial Sequence
  Chemically synthesized
uagcugagaaucaggaagcuaag

SEQ ID NO: 71419 - RNA, 23 nt, Artificial Sequence
  Chemically synthesized
auagcugagaaucaggaagcuaa

SEQ ID NO: 71420 - RNA, 23 nt, Artificial Sequence
  Chemically synthesized
aacuguuaguugguugucaguga

SEQ ID NO: 71421 - RNA, 23 nt, Artificial Sequence
  Chemically synthesized
gaggaaggcuacacucagugcuc

SEQ ID NO: 71422 - RNA, 23 nt, Artificial Sequence
  Chemically synthesized
ggaggaaggcuacacucagugcu

SEQ ID NO: 71423 - RNA, 23 nt, Artificial Sequence
  Chemically synthesized
uggaggaaggcuacacucagugc

SEQ ID NO: 71424 - RNA, 23 nt, Artificial Sequence
  Chemically synthesized
auggaggaaggcuacacucagug

SEQ ID NO: 71425 - RNA, 23 nt, Artificial Sequence
  Chemically synthesized
aauggaggaaggcuacacucagu

SEQ ID NO: 71426 - RNA, 23 nt, Artificial Sequence
  Chemically synthesized
ggcagggacauugugaguggacc

SEQ ID NO: 71427 - RNA, 23 nt, Artificial Sequence
  Chemically synthesized
uggcagggacauugugaguggac

SEQ ID NO: 71428 - RNA, 23 nt, Artificial Sequence
  Chemically synthesized
cuggcagggacauugugagugga

SEQ ID NO: 71429 - RNA, 23 nt, Artificial Sequence
  Chemically synthesized
gagcguaucgcucauggaaugag

SEQ ID NO: 71430 - RNA, 23 nt, Artificial Sequence
  Chemically synthesized
agagcguaucgcucauggaauga

SEQ ID NO: 71431 - RNA, 23 nt, Artificial Sequence
  Chemically synthesized
cagagcguaucgcucauggaaug

SEQ ID NO: 71432 - RNA, 23 nt, Artificial Sequence
  Chemically synthesized
ucagagcguaucgcucauggaau

SEQ ID NO: 71433 - RNA, 23 nt, Artificial Sequence
  Chemically synthesized
cucagagcguaucgcucauggaa

SEQ ID NO: 71434 - RNA, 23 nt, Artificial Sequence
  Chemically synthesized
gacaaacuugcguaaaacuggcu

SEQ ID NO: 71435 - RNA, 23 nt, Artificial Sequence
  Chemically synthesized
ggaagucagaggaacgaaguucg

SEQ ID NO: 71436 - RNA, 23 nt, Artificial Sequence
  Chemically synthesized
uggaagucagaggaacgaaguuc

SEQ ID NO: 71437 - RNA, 23 nt, Artificial Sequence
  Chemically synthesized
uuggaagucagaggaacgaaguu

SEQ ID NO: 71438 - RNA, 23 nt, Artificial Sequence
  Chemically synthesized
uuuggaagucagaggaacgaagu

SEQ ID NO: 71439 - RNA, 23 nt, Artificial Sequence
  Chemically synthesized
auuuggaagucagaggaacgaag

SEQ ID NO: 71440 - RNA, 23 nt, Artificial Sequence
  Chemically synthesized
guuugauguucuucaacgauuug

SEQ ID NO: 71441 - RNA, 23 nt, Artificial Sequence
  Chemically synthesized
uguuugauguucuucaacgauuu

SEQ ID NO: 71442 - RNA, 23 nt, Artificial Sequence
  Chemically synthesized
auguuugauguucuucaacgauu

SEQ ID NO: 71443 - RNA, 23 nt, Artificial Sequence
  Chemically synthesized
aauguuugauguucuucaacgau

SEQ ID NO: 71444 - RNA, 23 nt, Artificial Sequence
  Chemically synthesized
gaauguuugauguucuucaacga

SEQ ID NO: 71445 - RNA, 23 nt, Artificial Sequence
  Chemically synthesized
cagaagcuuuuauaucagaggac

SEQ ID NO: 71446 - RNA, 23 nt, Artificial Sequence
  Chemically synthesized
ucagaagcuuuuauaucagagga

SEQ ID NO: 71447 - RNA, 23 nt, Artificial Sequence
  Chemically synthesized
uucagaagcuuuuauaucagagg

SEQ ID NO: 71448 - RNA, 23 nt, Artificial Sequence
  Chemically synthesized
auucagaagcuuuuauaucagag

SEQ ID NO: 71449 - RNA, 23 nt, Artificial Sequence
  Chemically synthesized
uauucagaagcuuuuauaucaga

SEQ ID NO: 71450 - RNA, 23 nt, Artificial Sequence
  Chemically synthesized
aauucagaaguggcagucaugga

SEQ ID NO: 71451 - RNA, 23 nt, Artificial Sequence
  Chemically synthesized
uugcugaacuucaggaaauggca

SEQ ID NO: 71452 - RNA, 23 nt, Artificial Sequence
  Chemically synthesized
uaguugguugucagugaacaaua

SEQ ID NO: 71453 - RNA, 23 nt, Artificial Sequence
  Chemically synthesized
agaugaugccgauguuucuuacc

SEQ ID NO: 71454 - RNA, 23 nt, Artificial Sequence
  Chemically synthesized
aagaugaugccgauguuucuuac

SEQ ID NO: 71455 - RNA, 23 nt, Artificial Sequence
  Chemically synthesized
caagaugaugccgauguuucuua

SEQ ID NO: 71456 - RNA, 23 nt, Artificial Sequence
  Chemically synthesized
ccagaccguggcagcaaguucaa

SEQ ID NO: 71457 - RNA, 23 nt, Artificial Sequence
  Chemically synthesized
gcagaaugccaagcuacaacaac

SEQ ID NO: 71458 - RNA, 23 nt, Artificial Sequence
  Chemically synthesized
agcagaaugccaagcuacaacaa

SEQ ID NO: 71459 - RNA, 23 nt, Artificial Sequence
  Chemically synthesized
gagcagaaugccaagcuacaaca

SEQ ID NO: 71460 - RNA, 23 nt, Artificial Sequence
  Chemically synthesized
aaguugcugagcaggagaaacuu

SEQ ID NO: 71461 - RNA, 23 nt, Artificial Sequence
  Chemically synthesized
caccauuagaggacauuuagcgu

SEQ ID NO: 71462 - RNA, 23 nt, Artificial Sequence
  Chemically synthesized
ucaccauuagaggacauuuagcg

SEQ ID NO: 71463 - RNA, 23 nt, Artificial Sequence
  Chemically synthesized
uucaccauuagaggacauuuagc

SEQ ID NO: 71464 - RNA, 23 nt, Artificial Sequence
  Chemically synthesized
auucaccauuagaggacauuuag

SEQ ID NO: 71465 - RNA, 23 nt, Artificial Sequence
  Chemically synthesized
aauucaccauuagaggacauuua

SEQ ID NO: 71466 - RNA, 23 nt, Artificial Sequence
  Chemically synthesized
uggcaaaaauuucacaagacuua

SEQ ID NO: 71467 - RNA, 23 nt, Artificial Sequence
  Chemically synthesized
uuggcaaaaauuucacaagacuu

SEQ ID NO: 71468 - RNA, 23 nt, Artificial Sequence
  Chemically synthesized
uuuggcaaaaauuucacaagacu

SEQ ID NO: 71469 - RNA, 23 nt, Artificial Sequence
  Chemically synthesized
uuuuggcaaaaauuucacaagac

SEQ ID NO: 71470 - RNA, 23 nt, Artificial Sequence
  Chemically synthesized
uuuuuggcaaaaauuucacaaga

SEQ ID NO: 71471 - RNA, 23 nt, Artificial Sequence
  Chemically synthesized
cucugccuccugguaaaaggaca

SEQ ID NO: 71472 - RNA, 23 nt, Artificial Sequence
  Chemically synthesized
aguucaggagaaccaugaaaacg

SEQ ID NO: 71473 - RNA, 23 nt, Artificial Sequence
  Chemically synthesized
caguucaggagaaccaugaaaac

SEQ ID NO: 71474 - RNA, 23 nt, Artificial Sequence
  Chemically synthesized
ucaguucaggagaaccaugaaaa

SEQ ID NO: 71475 - RNA, 23 nt, Artificial Sequence
  Chemically synthesized
uucaguucaggagaaccaugaaa

SEQ ID NO: 71476 - RNA, 23 nt, Artificial Sequence
  Chemically synthesized
cuucaguucaggagaaccaugaa

SEQ ID NO: 71477 - RNA, 23 nt, Artificial Sequence
  Chemically synthesized
cgacagccaccaugacaaucagu

SEQ ID NO: 71478 - RNA, 23 nt, Artificial Sequence
  Chemically synthesized
ucgacagccaccaugacaaucag

SEQ ID NO: 71479 - RNA, 23 nt, Artificial Sequence
  Chemically synthesized
aucgacagccaccaugacaauca

SEQ ID NO: 71480 - RNA, 23 nt, Artificial Sequence
  Chemically synthesized
gaucgacagccaccaugacaauc

SEQ ID NO: 71481 - RNA, 23 nt, Artificial Sequence
  Chemically synthesized
ggaucgacagccaccaugacaau

SEQ ID NO: 71482 - RNA, 23 nt, Artificial Sequence
  Chemically synthesized
agcuagagaugcucaagaacggc

SEQ ID NO: 71483 - RNA, 23 nt, Artificial Sequence
  Chemically synthesized
cagcuagagaugcucaagaacgg

SEQ ID NO: 71484 - RNA, 23 nt, Artificial Sequence
  Chemically synthesized
gcagcuagagaugcucaagaacg

SEQ ID NO: 71485 - RNA, 23 nt, Artificial Sequence
  Chemically synthesized
cuaaaaaaagugagagcacuuaa

SEQ ID NO: 71486 - RNA, 23 nt, Artificial Sequence
  Chemically synthesized
uugcugggacuguacccaagaau

SEQ ID NO: 71487 - RNA, 23 nt, Artificial Sequence
  Chemically synthesized
cuugcugggacuguacccaagaa

SEQ ID NO: 71488 - RNA, 23 nt, Artificial Sequence
  Chemically synthesized
gagggauauguuccacguaacuu

SEQ ID NO: 71489 - RNA, 23 nt, Artificial Sequence
  Chemically synthesized
ggagggauauguuccacguaacu

SEQ ID NO: 71490 - RNA, 23 nt, Artificial Sequence
  Chemically synthesized
aggagggauauguuccacguaac

SEQ ID NO: 71491 - RNA, 23 nt, Artificial Sequence
  Chemically synthesized
aaggagggauauguuccacguaa

SEQ ID NO: 71492 - RNA, 23 nt, Artificial Sequence
  Chemically synthesized
uaaggagggauauguuccacgua

SEQ ID NO: 71493 - RNA, 23 nt, Artificial Sequence
  Chemically synthesized
guucgcuucuuccuucgucauga

SEQ ID NO: 71494 - RNA, 23 nt, Artificial Sequence
  Chemically synthesized
ugauuaugagccugagggagucc

SEQ ID NO: 71495 - RNA, 23 nt, Artificial Sequence
  Chemically synthesized
uugauuaugagccugagggaguc

SEQ ID NO: 71496 - RNA, 23 nt, Artificial Sequence
  Chemically synthesized
cuugauuaugagccugagggagu

SEQ ID NO: 71497 - RNA, 23 nt, Artificial Sequence
  Chemically synthesized
caguagaaauccagaauccauau

SEQ ID NO: 71498 - RNA, 23 nt, Artificial Sequence
  Chemically synthesized
cugaccuagaagccuuacgaaag

SEQ ID NO: 71499 - RNA, 23 nt, Artificial Sequence
  Chemically synthesized
gcugaccuagaagccuuacgaaa

SEQ ID NO: 71500 - RNA, 23 nt, Artificial Sequence
  Chemically synthesized
ugcugaccuagaagccuuacgaa

SEQ ID NO: 71501 - RNA, 23 nt, Artificial Sequence
  Chemically synthesized
uggcccugauuggaguccuucaa

SEQ ID NO: 71502 - RNA, 23 nt, Artificial Sequence
  Chemically synthesized
cccuauauccagucgucuacuau

SEQ ID NO: 71503 - RNA, 23 nt, Artificial Sequence
  Chemically synthesized
ucccuauauccagucgucuacua

SEQ ID NO: 71504 - RNA, 23 nt, Artificial Sequence
  Chemically synthesized
gucccuauauccagucgucuacu

SEQ ID NO: 71505 - RNA, 23 nt, Artificial Sequence
  Chemically synthesized
ggucccuauauccagucgucuac

SEQ ID NO: 71506 - RNA, 23 nt, Artificial Sequence
  Chemically synthesized
aggucccuauauccagucgucua

SEQ ID NO: 71507 - RNA, 23 nt, Artificial Sequence
  Chemically synthesized
gagcuugaucgccucuauaagga

SEQ ID NO: 71508 - RNA, 23 nt, Artificial Sequence
  Chemically synthesized
ugagcuugaucgccucuauaagg

SEQ ID NO: 71509 - RNA, 23 nt, Artificial Sequence
  Chemically synthesized
cugagcuugaucgccucuauaag

SEQ ID NO: 71510 - RNA, 23 nt, Artificial Sequence
  Chemically synthesized
gcugagcuugaucgccucuauaa

SEQ ID NO: 71511 - RNA, 23 nt, Artificial Sequence
  Chemically synthesized
ggcugagcuugaucgccucuaua

SEQ ID NO: 71512 - RNA, 23 nt, Artificial Sequence
  Chemically synthesized
cagcaacaauugcuggcaacuaa

SEQ ID NO: 71513 - RNA, 23 nt, Artificial Sequence
  Chemically synthesized
ccagcaacaauugcuggcaacua

SEQ ID NO: 71514 - RNA, 23 nt, Artificial Sequence
  Chemically synthesized
cccagcaacaauugcuggcaacu

SEQ ID NO: 71515 - RNA, 23 nt, Artificial Sequence
  Chemically synthesized
gcccagcaacaauugcuggcaac

SEQ ID NO: 71516 - RNA, 23 nt, Artificial Sequence
  Chemically synthesized
agcccagcaacaauugcuggcaa

SEQ ID NO: 71517 - RNA, 23 nt, Artificial Sequence
  Chemically synthesized
uaagcuacgguaccaguaauuag

SEQ ID NO: 71518 - RNA, 23 nt, Artificial Sequence
  Chemically synthesized
gcgccuuaaugauaaggagggau

SEQ ID NO: 71519 - RNA, 23 nt, Artificial Sequence
  Chemically synthesized
cgcgccuuaaugauaaggaggga

SEQ ID NO: 71520 - RNA, 23 nt, Artificial Sequence
  Chemically synthesized
gcgcgccuuaaugauaaggaggg

SEQ ID NO: 71521 - RNA, 23 nt, Artificial Sequence
  Chemically synthesized
ggcgcgccuuaaugauaaggagg

SEQ ID NO: 71522 - RNA, 23 nt, Artificial Sequence
  Chemically synthesized
gaaucaacagcagcacccagaga

SEQ ID NO: 71523 - RNA, 23 nt, Artificial Sequence
  Chemically synthesized
agaaucaacagcagcacccagag

SEQ ID NO: 71524 - RNA, 23 nt, Artificial Sequence
  Chemically synthesized
cagaaucaacagcagcacccaga

SEQ ID NO: 71525 - RNA, 23 nt, Artificial Sequence
  Chemically synthesized
ggucauucaggcuucagaggggc

SEQ ID NO: 71526 - RNA, 23 nt, Artificial Sequence
  Chemically synthesized
ucuaccaguuucaucugauggaa

SEQ ID NO: 71527 - RNA, 23 nt, Artificial Sequence
  Chemically synthesized
aaagcgaugaagaaugucucuag

SEQ ID NO: 71528 - RNA, 23 nt, Artificial Sequence
  Chemically synthesized
gcaaaaauuucacaagacuuauu

SEQ ID NO: 71529 - RNA, 23 nt, Artificial Sequence
  Chemically synthesized
ggcaaaaauuucacaagacuuau

SEQ ID NO: 71530 - RNA, 23 nt, Artificial Sequence
  Chemically synthesized
agggauauguuccacguaacuug

SEQ ID NO: 71531 - RNA, 23 nt, Artificial Sequence
  Chemically synthesized
auaaggagggauauguuccacgu

SEQ ID NO: 71532 - RNA, 23 nt, Artificial Sequence
  Chemically synthesized
ugaaagaaggagacugcaugaca

SEQ ID NO: 71533 - RNA, 23 nt, Artificial Sequence
  Chemically synthesized
auggauggacuccauuacauugu

SEQ ID NO: 71534 - RNA, 23 nt, Artificial Sequence
  Chemically synthesized
gauggauggacuccauuacauug

SEQ ID NO: 71535 - RNA, 23 nt, Artificial Sequence
  Chemically synthesized
ugauggauggacuccauuacauu

SEQ ID NO: 71536 - RNA, 23 nt, Artificial Sequence
  Chemically synthesized
auaccagagggccacacuuuuca

SEQ ID NO: 71537 - RNA, 23 nt, Artificial Sequence
  Chemically synthesized
agaccagacccuuucuccagguu

SEQ ID NO: 71538 - RNA, 23 nt, Artificial Sequence
  Chemically synthesized
aagaccagacccuuucuccaggu

SEQ ID NO: 71539 - RNA, 23 nt, Artificial Sequence
  Chemically synthesized
caagaccagacccuuucuccagg

SEQ ID NO: 71540 - RNA, 23 nt, Artificial Sequence
  Chemically synthesized
cauaccuucgguuggccaagacc

SEQ ID NO: 71541 - RNA, 23 nt, Artificial Sequence
  Chemically synthesized
gcauaccuucgguuggccaagac

SEQ ID NO: 71542 - RNA, 23 nt, Artificial Sequence
  Chemically synthesized
agcauaccuucgguuggccaaga

SEQ ID NO: 71543 - RNA, 23 nt, Artificial Sequence
  Chemically synthesized
cagcauaccuucgguuggccaag

SEQ ID NO: 71544 - RNA, 23 nt, Artificial Sequence
  Chemically synthesized
ccagcauaccuucgguuggccaa

SEQ ID NO: 71545 - RNA, 23 nt, Artificial Sequence
  Chemically synthesized
aaugcagaucuuuucccaagcca

SEQ ID NO: 71546 - RNA, 23 nt, Artificial Sequence
  Chemically synthesized
aaaugcagaucuuuucccaagcc

SEQ ID NO: 71547 - RNA, 23 nt, Artificial Sequence
  Chemically synthesized
caaaugcagaucuuuucccaagc

SEQ ID NO: 71548 - RNA, 23 nt, Artificial Sequence
  Chemically synthesized
ucaaaugcagaucuuuucccaag

SEQ ID NO: 71549 - RNA, 23 nt, Artificial Sequence
  Chemically synthesized
uucaaaugcagaucuuuucccaa

SEQ ID NO: 71550 - RNA, 23 nt, Artificial Sequence
  Chemically synthesized
guggcagucauggauaagcgugu

SEQ ID NO: 71551 - RNA, 23 nt, Artificial Sequence
  Chemically synthesized
aguggcagucauggauaagcgug

SEQ ID NO: 71552 - RNA, 23 nt, Artificial Sequence
  Chemically synthesized
gccucuauaaggagcugcagcua

SEQ ID NO: 71553 - RNA, 23 nt, Artificial Sequence
  Chemically synthesized
cgccucuauaaggagcugcagcu

SEQ ID NO: 71554 - RNA, 23 nt, Artificial Sequence
  Chemically synthesized
ucgccucuauaaggagcugcagc

SEQ ID NO: 71555 - RNA, 23 nt, Artificial Sequence
  Chemically synthesized
aucgccucuauaaggagcugcag

SEQ ID NO: 71556 - RNA, 23 nt, Artificial Sequence
  Chemically synthesized
gaucgccucuauaaggagcugca

SEQ ID NO: 71557 - RNA, 23 nt, Artificial Sequence
  Chemically synthesized
aacaauugcuggcaacuaaggaa

SEQ ID NO: 71558 - RNA, 23 nt, Artificial Sequence
  Chemically synthesized
caacaauugcuggcaacuaagga

SEQ ID NO: 71559 - RNA, 23 nt, Artificial Sequence
  Chemically synthesized
gcaacaauugcuggcaacuaagg

SEQ ID NO: 71560 - RNA, 23 nt, Artificial Sequence
  Chemically synthesized
agcaacaauugcuggcaacuaag

SEQ ID NO: 71561 - RNA, 23 nt, Artificial Sequence
  Chemically synthesized
auugggcaguugggaaaucagcu

SEQ ID NO: 71562 - RNA, 23 nt, Artificial Sequence
  Chemically synthesized
augaaagaaggagacugcaugac

SEQ ID NO: 71563 - RNA, 23 nt, Artificial Sequence
  Chemically synthesized
caugaaagaaggagacugcauga

SEQ ID NO: 71564 - RNA, 23 nt, Artificial Sequence
  Chemically synthesized
gucauuuaugcgcuuugggauua

SEQ ID NO: 71565 - RNA, 23 nt, Artificial Sequence
  Chemically synthesized
agucauuuaugcgcuuugggauu

SEQ ID NO: 71566 - RNA, 23 nt, Artificial Sequence
  Chemically synthesized
ccauggagaccaucucuguccca

SEQ ID NO: 71567 - RNA, 23 nt, Artificial Sequence
  Chemically synthesized
gccauggagaccaucucuguccc

SEQ ID NO: 71568 - RNA, 23 nt, Artificial Sequence
  Chemically synthesized
ggccauggagaccaucucugucc

SEQ ID NO: 71569 - RNA, 23 nt, Artificial Sequence
  Chemically synthesized
cggccauggagaccaucucuguc

SEQ ID NO: 71570 - RNA, 23 nt, Artificial Sequence
  Chemically synthesized
gcggccauggagaccaucucugu

SEQ ID NO: 71571 - RNA, 23 nt, Artificial Sequence
  Chemically synthesized
cuaacgcaccaaggccucuaaag

SEQ ID NO: 71572 - RNA, 23 nt, Artificial Sequence
  Chemically synthesized
ucuaacgcaccaaggccucuaaa

SEQ ID NO: 71573 - RNA, 23 nt, Artificial Sequence
  Chemically synthesized
augcugaccuagaagccuuacga

SEQ ID NO: 71574 - RNA, 23 nt, Artificial Sequence
  Chemically synthesized
gaugcugaccuagaagccuuacg

SEQ ID NO: 71575 - RNA, 23 nt, Artificial Sequence
  Chemically synthesized
ugaugcugaccuagaagccuuac

SEQ ID NO: 71576 - RNA, 23 nt, Artificial Sequence
  Chemically synthesized
gugaugcugaccuagaagccuua

SEQ ID NO: 71577 - RNA, 23 nt, Artificial Sequence
  Chemically synthesized
cuuaucuaauccuuaccgaaacc

SEQ ID NO: 71578 - RNA, 23 nt, Artificial Sequence
  Chemically synthesized
ucuuaucuaauccuuaccgaaac

SEQ ID NO: 71579 - RNA, 23 nt, Artificial Sequence
  Chemically synthesized
uucuuaucuaauccuuaccgaaa

SEQ ID NO: 71580 - RNA, 23 nt, Artificial Sequence
  Chemically synthesized
uuucuuaucuaauccuuaccgaa

SEQ ID NO: 71581 - RNA, 23 nt, Artificial Sequence
  Chemically synthesized
caacuaaauuacugccuuucuua

SEQ ID NO: 71582 - RNA, 23 nt, Artificial Sequence
  Chemically synthesized
caccuccuguuccuacaaaacca

SEQ ID NO: 71583 - RNA, 23 nt, Artificial Sequence
  Chemically synthesized
ccaccuccuguuccuacaaaacc

SEQ ID NO: 71584 - RNA, 23 nt, Artificial Sequence
  Chemically synthesized
accaccuccuguuccuacaaaac

SEQ ID NO: 71585 - RNA, 23 nt, Artificial Sequence
  Chemically synthesized
uaccaccuccuguuccuacaaaa

SEQ ID NO: 71586 - RNA, 23 nt, Artificial Sequence
  Chemically synthesized
uuggcccugauuggaguccuuca

SEQ ID NO: 71587 - RNA, 23 nt, Artificial Sequence
  Chemically synthesized
cuucacaaacuaaaggcucuaaa

SEQ ID NO: 71588 - RNA, 23 nt, Artificial Sequence
  Chemically synthesized
ugucucuagaagagaaugaagga

SEQ ID NO: 71589 - RNA, 23 nt, Artificial Sequence
  Chemically synthesized
gugauggauggacuccauuacau

SEQ ID NO: 71590 - RNA, 23 nt, Artificial Sequence
  Chemically synthesized
agugauggauggacuccauuaca

SEQ ID NO: 71591 - RNA, 23 nt, Artificial Sequence
  Chemically synthesized
uagugauggauggacuccauuac

SEQ ID NO: 71592 - RNA, 23 nt, Artificial Sequence
  Chemically synthesized
auagugauggauggacuccauua

SEQ ID NO: 71593 - RNA, 23 nt, Artificial Sequence
  Chemically synthesized
gagaagacucggugagcaugcgc

SEQ ID NO: 71594 - RNA, 23 nt, Artificial Sequence
  Chemically synthesized
ggagaagacucggugagcaugcg

SEQ ID NO: 71595 - RNA, 23 nt, Artificial Sequence
  Chemically synthesized
cggagaagacucggugagcaugc

SEQ ID NO: 71596 - RNA, 23 nt, Artificial Sequence
  Chemically synthesized
ccggagaagacucggugagcaug

SEQ ID NO: 71597 - RNA, 23 nt, Artificial Sequence
  Chemically synthesized
cccggagaagacucggugagcau

SEQ ID NO: 71598 - RNA, 23 nt, Artificial Sequence
  Chemically synthesized
agacaacagcccaaaucuccaga

SEQ ID NO: 71599 - RNA, 23 nt, Artificial Sequence
  Chemically synthesized
cagacaacagcccaaaucuccag

SEQ ID NO: 71600 - RNA, 23 nt, Artificial Sequence
  Chemically synthesized
ccagacaacagcccaaaucucca

SEQ ID NO: 71601 - RNA, 23 nt, Artificial Sequence
  Chemically synthesized
accuuccuuugguacucugagga

SEQ ID NO: 71602 - RNA, 23 nt, Artificial Sequence
  Chemically synthesized
caccuuccuuugguacucugagg

SEQ ID NO: 71603 - RNA, 23 nt, Artificial Sequence
  Chemically synthesized
ccaccuuccuuugguacucugag

SEQ ID NO: 71604 - RNA, 23 nt, Artificial Sequence
  Chemically synthesized
cccaccuuccuuugguacucuga

SEQ ID NO: 71605 - RNA, 23 nt, Artificial Sequence
  Chemically synthesized
cagaaugccaagcuacaacaaca

SEQ ID NO: 71606 - RNA, 23 nt, Artificial Sequence
  Chemically synthesized
aggaucgacagccaccaugacaa

SEQ ID NO: 71607 - RNA, 23 nt, Artificial Sequence
  Chemically synthesized
ugaagaauucaccauuagaggac

SEQ ID NO: 71608 - RNA, 23 nt, Artificial Sequence
  Chemically synthesized
uugaagaauucaccauuagagga

SEQ ID NO: 71609 - RNA, 23 nt, Artificial Sequence
  Chemically synthesized
auugaagaauucaccauuagagg

SEQ ID NO: 71610 - RNA, 23 nt, Artificial Sequence
  Chemically synthesized
agaucucaggauccaaguuuaaa

SEQ ID NO: 71611 - RNA, 23 nt, Artificial Sequence
  Chemically synthesized
aagaucucaggauccaaguuuaa

SEQ ID NO: 71612 - RNA, 23 nt, Artificial Sequence
  Chemically synthesized
caagaucucaggauccaaguuua

SEQ ID NO: 71613 - RNA, 23 nt, Artificial Sequence
  Chemically synthesized
cuuugggauuaugaaccucagaa

SEQ ID NO: 71614 - RNA, 23 nt, Artificial Sequence
  Chemically synthesized
gagguggucucucugguuccuga

SEQ ID NO: 71615 - RNA, 23 nt, Artificial Sequence
  Chemically synthesized
cagaggguccuaaugggccaaau

SEQ ID NO: 71616 - RNA, 23 nt, Artificial Sequence
  Chemically synthesized
cagacacugcccaacaugagauc

SEQ ID NO: 71617 - RNA, 23 nt, Artificial Sequence
  Chemically synthesized
acagacacugcccaacaugagau

SEQ ID NO: 71618 - RNA, 23 nt, Artificial Sequence
  Chemically synthesized
uacagacacugcccaacaugaga

SEQ ID NO: 71619 - RNA, 23 nt, Artificial Sequence
  Chemically synthesized
auacagacacugcccaacaugag

SEQ ID NO: 71620 - RNA, 23 nt, Artificial Sequence
  Chemically synthesized
aauacagacacugcccaacauga

SEQ ID NO: 71621 - RNA, 23 nt, Artificial Sequence
  Chemically synthesized
aaauacagacacugcccaacaug

SEQ ID NO: 71622 - RNA, 23 nt, Artificial Sequence
  Chemically synthesized
aaaauacagacacugcccaacau

SEQ ID NO: 71623 - RNA, 23 nt, Artificial Sequence
  Chemically synthesized
gaaaauacagacacugcccaaca

SEQ ID NO: 71624 - RNA, 23 nt, Artificial Sequence
  Chemically synthesized
ugaaaauacagacacugcccaac

SEQ ID NO: 71625 - RNA, 23 nt, Artificial Sequence
  Chemically synthesized
augaaaauacagacacugcccaa

SEQ ID NO: 71626 - RNA, 23 nt, Artificial Sequence
  Chemically synthesized
gcacuucacagaaguuccaguua

SEQ ID NO: 71627 - RNA, 23 nt, Artificial Sequence
  Chemically synthesized
agcacuucacagaaguuccaguu

SEQ ID NO: 71628 - RNA, 23 nt, Artificial Sequence
  Chemically synthesized
cagcacuucacagaaguuccagu

SEQ ID NO: 71629 - RNA, 23 nt, Artificial Sequence
  Chemically synthesized
gcagcacuucacagaaguuccag

SEQ ID NO: 71630 - RNA, 23 nt, Artificial Sequence
  Chemically synthesized
agcagcacuucacagaaguucca

SEQ ID NO: 71631 - RNA, 23 nt, Artificial Sequence
  Chemically synthesized
cagccaccaugacaaucagucug

SEQ ID NO: 71632 - RNA, 23 nt, Artificial Sequence
  Chemically synthesized
acagccaccaugacaaucagucu

SEQ ID NO: 71633 - RNA, 23 nt, Artificial Sequence
  Chemically synthesized
gacagccaccaugacaaucaguc

SEQ ID NO: 71634 - RNA, 23 nt, Artificial Sequence
  Chemically synthesized
aaaggcuaaaagaaauagcugag

SEQ ID NO: 71635 - RNA, 23 nt, Artificial Sequence
  Chemically synthesized
aaaaggcuaaaagaaauagcuga

SEQ ID NO: 71636 - RNA, 23 nt, Artificial Sequence
  Chemically synthesized
cugaaacuuccacacagaauuuu

SEQ ID NO: 71637 - RNA, 23 nt, Artificial Sequence
  Chemically synthesized
aaugaugaugagcugcccaugaa

SEQ ID NO: 71638 - RNA, 23 nt, Artificial Sequence
  Chemically synthesized
gaaugaugaugagcugcccauga

SEQ ID NO: 71639 - RNA, 23 nt, Artificial Sequence
  Chemically synthesized
cuacacucagugcucccaauuuc

SEQ ID NO: 71640 - RNA, 23 nt, Artificial Sequence
  Chemically synthesized
gcuacacucagugcucccaauuu

SEQ ID NO: 71641 - RNA, 23 nt, Artificial Sequence
  Chemically synthesized
ggcuacacucagugcucccaauu

SEQ ID NO: 71642 - RNA, 23 nt, Artificial Sequence
  Chemically synthesized
aggcuacacucagugcucccaau

SEQ ID NO: 71643 - RNA, 23 nt, Artificial Sequence
  Chemically synthesized
aaggcuacacucagugcucccaa

SEQ ID NO: 71644 - RNA, 23 nt, Artificial Sequence
  Chemically synthesized
uugauguucuucaacgauuugga

SEQ ID NO: 71645 - RNA, 23 nt, Artificial Sequence
  Chemically synthesized
uuugauguucuucaacgauuugg

SEQ ID NO: 71646 - RNA, 23 nt, Artificial Sequence
  Chemically synthesized
caguugcggauaaugagcgaaug

SEQ ID NO: 71647 - RNA, 23 nt, Artificial Sequence
  Chemically synthesized
ccaguugcggauaaugagcgaau

SEQ ID NO: 71648 - RNA, 23 nt, Artificial Sequence
  Chemically synthesized
uccaguugcggauaaugagcgaa

SEQ ID NO: 71649 - RNA, 23 nt, Artificial Sequence
  Chemically synthesized
guccaguugcggauaaugagcga

SEQ ID NO: 71650 - RNA, 23 nt, Artificial Sequence
  Chemically synthesized
cagcaggcgccaggaaaaaacuu

SEQ ID NO: 71651 - RNA, 23 nt, Artificial Sequence
  Chemically synthesized
acagcaggcgccaggaaaaaacu

SEQ ID NO: 71652 - RNA, 23 nt, Artificial Sequence
  Chemically synthesized
auaucgaagaaaggagaacggug

SEQ ID NO: 71653 - RNA, 23 nt, Artificial Sequence
  Chemically synthesized
cacucagugcucccaauuucuuu

SEQ ID NO: 71654 - RNA, 23 nt, Artificial Sequence
  Chemically synthesized
aaaugcugcugauagugauggau

SEQ ID NO: 71655 - RNA, 23 nt, Artificial Sequence
  Chemically synthesized
uaaaugcugcugauagugaugga

SEQ ID NO: 71656 - RNA, 23 nt, Artificial Sequence
  Chemically synthesized
guaaaugcugcugauagugaugg

SEQ ID NO: 71657 - RNA, 23 nt, Artificial Sequence
  Chemically synthesized
agaauuugaccuuguacagagaa

SEQ ID NO: 71658 - RNA, 23 nt, Artificial Sequence
  Chemically synthesized
gcucagagcguaucgcucaugga

SEQ ID NO: 71659 - RNA, 23 nt, Artificial Sequence
  Chemically synthesized
ggcucagagcguaucgcucaugg

SEQ ID NO: 71660 - RNA, 23 nt, Artificial Sequence
  Chemically synthesized
uggcucagagcguaucgcucaug

SEQ ID NO: 71661 - RNA, 23 nt, Artificial Sequence
  Chemically synthesized
cuggcucagagcguaucgcucau

SEQ ID NO: 71662 - RNA, 23 nt, Artificial Sequence
  Chemically synthesized
aaucuccagaauaacccagaaga

SEQ ID NO: 71663 - RNA, 23 nt, Artificial Sequence
  Chemically synthesized
aaaucuccagaauaacccagaag

SEQ ID NO: 71664 - RNA, 23 nt, Artificial Sequence
  Chemically synthesized
caaaucuccagaauaacccagaa

SEQ ID NO: 71665 - RNA, 23 nt, Artificial Sequence
  Chemically synthesized
auauuuacauguggagcccgaaa

SEQ ID NO: 71666 - RNA, 23 nt, Artificial Sequence
  Chemically synthesized
auaucagaggaccaccauagcgg

SEQ ID NO: 71667 - RNA, 23 nt, Artificial Sequence
  Chemically synthesized
uauaucagaggaccaccauagcg

SEQ ID NO: 71668 - RNA, 23 nt, Artificial Sequence
  Chemically synthesized
uuauaucagaggaccaccauagc

SEQ ID NO: 71669 - RNA, 23 nt, Artificial Sequence
  Chemically synthesized
uuuauaucagaggaccaccauag

SEQ ID NO: 71670 - RNA, 23 nt, Artificial Sequence
  Chemically synthesized
uuuuauaucagaggaccaccaua

SEQ ID NO: 71671 - RNA, 23 nt, Artificial Sequence
  Chemically synthesized
gcugacuuggauggguaugaugg

SEQ ID NO: 71672 - RNA, 23 nt, Artificial Sequence
  Chemically synthesized
aggcuucuaggucagcaucacuc

SEQ ID NO: 71673 - RNA, 23 nt, Artificial Sequence
  Chemically synthesized
ggcuucuaggucagcaucacucu

SEQ ID NO: 71674 - RNA, 23 nt, Artificial Sequence
  Chemically synthesized
gcuucuaggucagcaucacucug

SEQ ID NO: 71675 - RNA, 23 nt, Artificial Sequence
  Chemically synthesized
cuucuaggucagcaucacucugg

SEQ ID NO: 71676 - RNA, 23 nt, Artificial Sequence
  Chemically synthesized
uucuaggucagcaucacucuggu

SEQ ID NO: 71677 - RNA, 23 nt, Artificial Sequence
  Chemically synthesized
aaguuauuguucacugacaacca

SEQ ID NO: 71678 - RNA, 23 nt, Artificial Sequence
  Chemically synthesized
aguuauuguucacugacaaccaa

SEQ ID NO: 71679 - RNA, 23 nt, Artificial Sequence
  Chemically synthesized
guuauuguucacugacaaccaac

SEQ ID NO: 71680 - RNA, 23 nt, Artificial Sequence
  Chemically synthesized
uuauuguucacugacaaccaacu

SEQ ID NO: 71681 - RNA, 23 nt, Artificial Sequence
  Chemically synthesized
augauugucaugcagucuccuuc

SEQ ID NO: 71682 - RNA, 23 nt, Artificial Sequence
  Chemically synthesized
ugauugucaugcagucuccuucu

SEQ ID NO: 71683 - RNA, 23 nt, Artificial Sequence
  Chemically synthesized
gauugucaugcagucuccuucuu

SEQ ID NO: 71684 - RNA, 23 nt, Artificial Sequence
  Chemically synthesized
auugucaugcagucuccuucuuu

SEQ ID NO: 71685 - RNA, 23 nt, Artificial Sequence
  Chemically synthesized
uugucaugcagucuccuucuuuc

SEQ ID NO: 71686 - RNA, 23 nt, Artificial Sequence
  Chemically synthesized
uaauucuuggguacagucccagc

SEQ ID NO: 71687 - RNA, 23 nt, Artificial Sequence
  Chemically synthesized
gcuccuuugucuugguuuaauuc

SEQ ID NO: 71688 - RNA, 23 nt, Artificial Sequence
  Chemically synthesized
cuccuuugucuugguuuaauucu

SEQ ID NO: 71689 - RNA, 23 nt, Artificial Sequence
  Chemically synthesized
uccuuugucuugguuuaauucuu

SEQ ID NO: 71690 - RNA, 23 nt, Artificial Sequence
  Chemically synthesized
ccauucgauuucaucuucgucuu

SEQ ID NO: 71691 - RNA, 23 nt, Artificial Sequence
  Chemically synthesized
cauucgauuucaucuucgucuuc

SEQ ID NO: 71692 - RNA, 23 nt, Artificial Sequence
  Chemically synthesized
auucgauuucaucuucgucuucc

SEQ ID NO: 71693 - RNA, 23 nt, Artificial Sequence
  Chemically synthesized
cauuucuuuuuaaacuuggaucc

SEQ ID NO: 71694 - RNA, 23 nt, Artificial Sequence
  Chemically synthesized
auuucuuuuuaaacuuggauccu

SEQ ID NO: 71695 - RNA, 23 nt, Artificial Sequence
  Chemically synthesized
uuucuuuuuaaacuuggauccug

SEQ ID NO: 71696 - RNA, 23 nt, Artificial Sequence
  Chemically synthesized
gguuuugguuuaguucccaugga

SEQ ID NO: 71697 - RNA, 23 nt, Artificial Sequence
  Chemically synthesized
guuuugguuuaguucccauggac

SEQ ID NO: 71698 - RNA, 23 nt, Artificial Sequence
  Chemically synthesized
uuuugguuuaguucccauggacg

SEQ ID NO: 71699 - RNA, 23 nt, Artificial Sequence
  Chemically synthesized
uuugguuuaguucccauggacgg

SEQ ID NO: 71700 - RNA, 23 nt, Artificial Sequence
  Chemically synthesized
gagaucuugguccacucacaaug

SEQ ID NO: 71701 - RNA, 23 nt, Artificial Sequence
  Chemically synthesized
agaucuugguccacucacaaugu

SEQ ID NO: 71702 - RNA, 23 nt, Artificial Sequence
  Chemically synthesized
uuuacuagacaggauucuuguag

SEQ ID NO: 71703 - RNA, 23 nt, Artificial Sequence
  Chemically synthesized
uuacuagacaggauucuuguaga

SEQ ID NO: 71704 - RNA, 23 nt, Artificial Sequence
  Chemically synthesized
gggguuuucugaaggguggaagu

SEQ ID NO: 71705 - RNA, 23 nt, Artificial Sequence
  Chemically synthesized
ggguuuucugaaggguggaagua

SEQ ID NO: 71706 - RNA, 23 nt, Artificial Sequence
  Chemically synthesized
gguuuucugaaggguggaaguaa

SEQ ID NO: 71707 - RNA, 23 nt, Artificial Sequence
  Chemically synthesized
guuuucugaaggguggaaguaag

SEQ ID NO: 71708 - RNA, 23 nt, Artificial Sequence
  Chemically synthesized
uuuucugaaggguggaaguaagg

SEQ ID NO: 71709 - RNA, 23 nt, Artificial Sequence
  Chemically synthesized
cuguucaauuuccuccacaaguu

SEQ ID NO: 71710 - RNA, 23 nt, Artificial Sequence
  Chemically synthesized
uguucaauuuccuccacaaguuu

SEQ ID NO: 71711 - RNA, 23 nt, Artificial Sequence
  Chemically synthesized
guucaauuuccuccacaaguuuc

SEQ ID NO: 71712 - RNA, 23 nt, Artificial Sequence
  Chemically synthesized
uucaauuuccuccacaaguuucc

SEQ ID NO: 71713 - RNA, 23 nt, Artificial Sequence
  Chemically synthesized
uuucugaaggguggaaguaaggu

SEQ ID NO: 71714 - RNA, 23 nt, Artificial Sequence
  Chemically synthesized
cggcuuugucucuucgacgcucg

SEQ ID NO: 71715 - RNA, 23 nt, Artificial Sequence
  Chemically synthesized
ggcuuugucucuucgacgcucgu

SEQ ID NO: 71716 - RNA, 23 nt, Artificial Sequence
  Chemically synthesized
gcuuugucucuucgacgcucgug

SEQ ID NO: 71717 - RNA, 23 nt, Artificial Sequence
  Chemically synthesized
cuuugucucuucgacgcucguga

SEQ ID NO: 71718 - RNA, 23 nt, Artificial Sequence
  Chemically synthesized
uuugucucuucgacgcucgugac

SEQ ID NO: 71719 - RNA, 23 nt, Artificial Sequence
  Chemically synthesized
uucuucgauauucaccaggaacu

SEQ ID NO: 71720 - RNA, 23 nt, Artificial Sequence
  Chemically synthesized
gacauucuucaucgcuuucaagc

SEQ ID NO: 71721 - RNA, 23 nt, Artificial Sequence
  Chemically synthesized
acauucuucaucgcuuucaagcu

SEQ ID NO: 71722 - RNA, 23 nt, Artificial Sequence
  Chemically synthesized
cauucuucaucgcuuucaagcua

SEQ ID NO: 71723 - RNA, 23 nt, Artificial Sequence
  Chemically synthesized
auucuucaucgcuuucaagcuac

SEQ ID NO: 71724 - RNA, 23 nt, Artificial Sequence
  Chemically synthesized
uucuucaucgcuuucaagcuaca

SEQ ID NO: 71725 - RNA, 23 nt, Artificial Sequence
  Chemically synthesized
gcuguagagcugccuucuucuuc

SEQ ID NO: 71726 - RNA, 23 nt, Artificial Sequence
  Chemically synthesized
uucuuucaugggcagcucaucau

SEQ ID NO: 71727 - RNA, 23 nt, Artificial Sequence
  Chemically synthesized
ucuuucaugggcagcucaucauc

SEQ ID NO: 71728 - RNA, 23 nt, Artificial Sequence
  Chemically synthesized
cuuucaugggcagcucaucauca

SEQ ID NO: 71729 - RNA, 23 nt, Artificial Sequence
  Chemically synthesized
uuucaugggcagcucaucaucau

SEQ ID NO: 71730 - RNA, 23 nt, Artificial Sequence
  Chemically synthesized
uacauuuacaccaaacuguacca

SEQ ID NO: 71731 - RNA, 23 nt, Artificial Sequence
  Chemically synthesized
acauuuacaccaaacuguaccag

SEQ ID NO: 71732 - RNA, 23 nt, Artificial Sequence
  Chemically synthesized
cauuuacaccaaacuguaccagg

SEQ ID NO: 71733 - RNA, 23 nt, Artificial Sequence
  Chemically synthesized
auuuacaccaaacuguaccagga

SEQ ID NO: 71734 - RNA, 23 nt, Artificial Sequence
  Chemically synthesized
cuauuggaauaaauguucucugg

SEQ ID NO: 71735 - RNA, 23 nt, Artificial Sequence
  Chemically synthesized
uauuggaauaaauguucucuggg

SEQ ID NO: 71736 - RNA, 23 nt, Artificial Sequence
  Chemically synthesized
ucuccaucaucaacuugauccag

SEQ ID NO: 71737 - RNA, 23 nt, Artificial Sequence
  Chemically synthesized
cuccaucaucaacuugauccaga

SEQ ID NO: 71738 - RNA, 23 nt, Artificial Sequence
  Chemically synthesized
uccaucaucaacuugauccagag

SEQ ID NO: 71739 - RNA, 23 nt, Artificial Sequence
  Chemically synthesized
uguuuuuaaagucagcuaugauc

SEQ ID NO: 71740 - RNA, 23 nt, Artificial Sequence
  Chemically synthesized
guuuuuaaagucagcuaugaucu

SEQ ID NO: 71741 - RNA, 23 nt, Artificial Sequence
  Chemically synthesized
uuuuuaaagucagcuaugaucuu

SEQ ID NO: 71742 - RNA, 23 nt, Artificial Sequence
  Chemically synthesized
uuuuaaagucagcuaugaucuug

SEQ ID NO: 71743 - RNA, 23 nt, Artificial Sequence
  Chemically synthesized
uuuaaagucagcuaugaucuuga

SEQ ID NO: 71744 - RNA, 23 nt, Artificial Sequence
  Chemically synthesized
cggguaagucuguagcaaguuuc

SEQ ID NO: 71745 - RNA, 23 nt, Artificial Sequence
  Chemically synthesized
gagguacagaagcagagccuugg

SEQ ID NO: 71746 - RNA, 23 nt, Artificial Sequence
  Chemically synthesized
agguacagaagcagagccuuggc

SEQ ID NO: 71747 - RNA, 23 nt, Artificial Sequence
  Chemically synthesized
gguacagaagcagagccuuggcu

SEQ ID NO: 71748 - RNA, 23 nt, Artificial Sequence
  Chemically synthesized
guacagaagcagagccuuggcuu

SEQ ID NO: 71749 - RNA, 23 nt, Artificial Sequence
  Chemically synthesized
uacagaagcagagccuuggcuug

SEQ ID NO: 71750 - RNA, 23 nt, Artificial Sequence
  Chemically synthesized
uuaaagucagcuaugaucuugac

SEQ ID NO: 71751 - RNA, 23 nt, Artificial Sequence
  Chemically synthesized
cucuucuagagacauucuucauc

SEQ ID NO: 71752 - RNA, 23 nt, Artificial Sequence
  Chemically synthesized
ucuucuagagacauucuucaucg

SEQ ID NO: 71753 - RNA, 23 nt, Artificial Sequence
  Chemically synthesized
cuucuagagacauucuucaucgc

SEQ ID NO: 71754 - RNA, 23 nt, Artificial Sequence
  Chemically synthesized
uucuagagacauucuucaucgcu

SEQ ID NO: 71755 - RNA, 23 nt, Artificial Sequence
  Chemically synthesized
ucuagagacauucuucaucgcuu

SEQ ID NO: 71756 - RNA, 23 nt, Artificial Sequence
  Chemically synthesized
uuuacgcaaguuuguccuuuuac

SEQ ID NO: 71757 - RNA, 23 nt, Artificial Sequence
  Chemically synthesized
uuacgcaaguuuguccuuuuacc

SEQ ID NO: 71758 - RNA, 23 nt, Artificial Sequence
  Chemically synthesized
uggauuuuagagccuuuaguuug

SEQ ID NO: 71759 - RNA, 23 nt, Artificial Sequence
  Chemically synthesized
ggauuuuagagccuuuaguuugu

SEQ ID NO: 71760 - RNA, 23 nt, Artificial Sequence
  Chemically synthesized
gauuuuagagccuuuaguuugug

SEQ ID NO: 71761 - RNA, 23 nt, Artificial Sequence
  Chemically synthesized
auuuuagagccuuuaguuuguga

SEQ ID NO: 71762 - RNA, 23 nt, Artificial Sequence
  Chemically synthesized
uuuuagagccuuuaguuugugaa

SEQ ID NO: 71763 - RNA, 23 nt, Artificial Sequence
  Chemically synthesized
guucuugagcaucucuagcugcc

SEQ ID NO: 71764 - RNA, 23 nt, Artificial Sequence
  Chemically synthesized
uucuugagcaucucuagcugccu

SEQ ID NO: 71765 - RNA, 23 nt, Artificial Sequence
  Chemically synthesized
ucuugagcaucucuagcugccug

SEQ ID NO: 71766 - RNA, 23 nt, Artificial Sequence
  Chemically synthesized
cuugagcaucucuagcugccugg

SEQ ID NO: 71767 - RNA, 23 nt, Artificial Sequence
  Chemically synthesized
uugagcaucucuagcugccuggu

SEQ ID NO: 71768 - RNA, 23 nt, Artificial Sequence
  Chemically synthesized
acaguucuucacugacaauauac

SEQ ID NO: 71769 - RNA, 23 nt, Artificial Sequence
  Chemically synthesized
caguucuucacugacaauauaca

SEQ ID NO: 71770 - RNA, 23 nt, Artificial Sequence
  Chemically synthesized
aguucuucacugacaauauacaa

SEQ ID NO: 71771 - RNA, 23 nt, Artificial Sequence
  Chemically synthesized
auacuuaucugagugcuacacgg

SEQ ID NO: 71772 - RNA, 23 nt, Artificial Sequence
  Chemically synthesized
uacuuaucugagugcuacacggg

SEQ ID NO: 71773 - RNA, 23 nt, Artificial Sequence
  Chemically synthesized
acuuaucugagugcuacacggga

SEQ ID NO: 71774 - RNA, 23 nt, Artificial Sequence
  Chemically synthesized
cuuaucugagugcuacacgggac

SEQ ID NO: 71775 - RNA, 23 nt, Artificial Sequence
  Chemically synthesized
uuaucugagugcuacacgggaca

SEQ ID NO: 71776 - RNA, 23 nt, Artificial Sequence
  Chemically synthesized
uugguucuucuggguuauucugg

SEQ ID NO: 71777 - RNA, 23 nt, Artificial Sequence
  Chemically synthesized
ugguucuucuggguuauucugga

SEQ ID NO: 71778 - RNA, 23 nt, Artificial Sequence
  Chemically synthesized
gguucuucuggguuauucuggag

SEQ ID NO: 71779 - RNA, 23 nt, Artificial Sequence
  Chemically synthesized
guucuucuggguuauucuggaga

SEQ ID NO: 71780 - RNA, 23 nt, Artificial Sequence
  Chemically synthesized
uucuucuggguuauucuggagau

SEQ ID NO: 71781 - RNA, 23 nt, Artificial Sequence
  Chemically synthesized
uuuauuugcaaccugagcauccc

SEQ ID NO: 71782 - RNA, 23 nt, Artificial Sequence
  Chemically synthesized
aaacuuggauccugagaucuugg

SEQ ID NO: 71783 - RNA, 23 nt, Artificial Sequence
  Chemically synthesized
aacuuggauccugagaucuuggu

SEQ ID NO: 71784 - RNA, 23 nt, Artificial Sequence
  Chemically synthesized
acuuggauccugagaucuugguc

SEQ ID NO: 71785 - RNA, 23 nt, Artificial Sequence
  Chemically synthesized
cuuggauccugagaucuuggucc

SEQ ID NO: 71786 - RNA, 23 nt, Artificial Sequence
  Chemically synthesized
uuggauccugagaucuuggucca

SEQ ID NO: 71787 - RNA, 23 nt, Artificial Sequence
  Chemically synthesized
uuguuacaugaggcagcacaaug

SEQ ID NO: 71788 - RNA, 23 nt, Artificial Sequence
  Chemically synthesized
uguuacaugaggcagcacaaugu

SEQ ID NO: 71789 - RNA, 23 nt, Artificial Sequence
  Chemically synthesized
guuacaugaggcagcacaaugua

SEQ ID NO: 71790 - RNA, 23 nt, Artificial Sequence
  Chemically synthesized
uuacaugaggcagcacaauguaa

SEQ ID NO: 71791 - RNA, 23 nt, Artificial Sequence
  Chemically synthesized
uacaugaggcagcacaauguaau

SEQ ID NO: 71792 - RNA, 23 nt, Artificial Sequence
  Chemically synthesized
caucaaacauucgcucauuaucc

SEQ ID NO: 71793 - RNA, 23 nt, Artificial Sequence
  Chemically synthesized
aggacuauuaacaccguucuccu

SEQ ID NO: 71794 - RNA, 23 nt, Artificial Sequence
  Chemically synthesized
ggacuauuaacaccguucuccuu

SEQ ID NO: 71795 - RNA, 23 nt, Artificial Sequence
  Chemically synthesized
gacuauuaacaccguucuccuuu

SEQ ID NO: 71796 - RNA, 23 nt, Artificial Sequence
  Chemically synthesized
acuauuaacaccguucuccuuuc

SEQ ID NO: 71797 - RNA, 23 nt, Artificial Sequence
  Chemically synthesized
ucuucgauauucaccaggaacuu

SEQ ID NO: 71798 - RNA, 23 nt, Artificial Sequence
  Chemically synthesized
cuucgauauucaccaggaacuuu

SEQ ID NO: 71799 - RNA, 23 nt, Artificial Sequence
  Chemically synthesized
uucgauauucaccaggaacuuuu

SEQ ID NO: 71800 - RNA, 23 nt, Artificial Sequence
  Chemically synthesized
auucucuucuagagacauucuuc

SEQ ID NO: 71801 - RNA, 23 nt, Artificial Sequence
  Chemically synthesized
uucucuucuagagacauucuuca

SEQ ID NO: 71802 - RNA, 23 nt, Artificial Sequence
  Chemically synthesized
ucucuucuagagacauucuucau

SEQ ID NO: 71803 - RNA, 23 nt, Artificial Sequence
  Chemically synthesized
uucaucgcuuucaagcuacauug

SEQ ID NO: 71804 - RNA, 23 nt, Artificial Sequence
  Chemically synthesized
ucaucgcuuucaagcuacauugu

SEQ ID NO: 71805 - RNA, 23 nt, Artificial Sequence
  Chemically synthesized
caucgcuuucaagcuacauuguc

SEQ ID NO: 71806 - RNA, 23 nt, Artificial Sequence
  Chemically synthesized
aagcugacuuggauggguaugau

SEQ ID NO: 71807 - RNA, 23 nt, Artificial Sequence
  Chemically synthesized
agcugacuuggauggguaugaug

SEQ ID NO: 71808 - RNA, 23 nt, Artificial Sequence
  Chemically synthesized
ugggguuuucugaaggguggaag

SEQ ID NO: 71809 - RNA, 23 nt, Artificial Sequence
  Chemically synthesized
agguaugcugggagauagcagca

SEQ ID NO: 71810 - RNA, 23 nt, Artificial Sequence
  Chemically synthesized
gguaugcugggagauagcagcac

SEQ ID NO: 71811 - RNA, 23 nt, Artificial Sequence
  Chemically synthesized
guaugcugggagauagcagcacu

SEQ ID NO: 71812 - RNA, 23 nt, Artificial Sequence
  Chemically synthesized
uaugcugggagauagcagcacuc

SEQ ID NO: 71813 - RNA, 23 nt, Artificial Sequence
  Chemically synthesized
aagaaacaucggcaucaucuugg

SEQ ID NO: 71814 - RNA, 23 nt, Artificial Sequence
  Chemically synthesized
agaaacaucggcaucaucuugga

SEQ ID NO: 71815 - RNA, 23 nt, Artificial Sequence
  Chemically synthesized
gaaacaucggcaucaucuuggac

SEQ ID NO: 71816 - RNA, 23 nt, Artificial Sequence
  Chemically synthesized
uuauuugcaaccugagcaucccg

SEQ ID NO: 71817 - RNA, 23 nt, Artificial Sequence
  Chemically synthesized
uauuugcaaccugagcaucccgc

SEQ ID NO: 71818 - RNA, 23 nt, Artificial Sequence
  Chemically synthesized
auuugcaaccugagcaucccgca

SEQ ID NO: 71819 - RNA, 23 nt, Artificial Sequence
  Chemically synthesized
uuuugcuguagagcugccuucuu

SEQ ID NO: 71820 - RNA, 23 nt, Artificial Sequence
  Chemically synthesized
uuugcuguagagcugccuucuuc

SEQ ID NO: 71821 - RNA, 23 nt, Artificial Sequence
  Chemically synthesized
uugcuguagagcugccuucuucu

SEQ ID NO: 71822 - RNA, 23 nt, Artificial Sequence
  Chemically synthesized
uucuuaagaugcuacaaaaacuc

SEQ ID NO: 71823 - RNA, 23 nt, Artificial Sequence
  Chemically synthesized
ucuuaagaugcuacaaaaacuca

SEQ ID NO: 71824 - RNA, 23 nt, Artificial Sequence
  Chemically synthesized
cuuaagaugcuacaaaaacucau

SEQ ID NO: 71825 - RNA, 23 nt, Artificial Sequence
  Chemically synthesized
uuaagaugcuacaaaaacucaua

SEQ ID NO: 71826 - RNA, 23 nt, Artificial Sequence
  Chemically synthesized
uaagaugcuacaaaaacucauau

SEQ ID NO: 71827 - RNA, 23 nt, Artificial Sequence
  Chemically synthesized
uucauucucuucuagagacauuc

SEQ ID NO: 71828 - RNA, 23 nt, Artificial Sequence
  Chemically synthesized
ucauucucuucuagagacauucu

SEQ ID NO: 71829 - RNA, 23 nt, Artificial Sequence
  Chemically synthesized
cauucucuucuagagacauucuu

SEQ ID NO: 71830 - RNA, 23 nt, Artificial Sequence
  Chemically synthesized
uucaggccaagcuccuuugucuu

SEQ ID NO: 71831 - RNA, 23 nt, Artificial Sequence
  Chemically synthesized
aauucuuggguacagucccagca

SEQ ID NO: 71832 - RNA, 23 nt, Artificial Sequence
  Chemically synthesized
guggaugauugucaugcagucuc

SEQ ID NO: 71833 - RNA, 23 nt, Artificial Sequence
  Chemically synthesized
uggaugauugucaugcagucucc

SEQ ID NO: 71834 - RNA, 23 nt, Artificial Sequence
  Chemically synthesized
ggaugauugucaugcagucuccu

SEQ ID NO: 71835 - RNA, 23 nt, Artificial Sequence
  Chemically synthesized
gaugauugucaugcagucuccuu

SEQ ID NO: 71836 - RNA, 23 nt, Artificial Sequence
  Chemically synthesized
gagguucauaaucccaaagcgca

SEQ ID NO: 71837 - RNA, 23 nt, Artificial Sequence
  Chemically synthesized
agguucauaaucccaaagcgcau

SEQ ID NO: 71838 - RNA, 23 nt, Artificial Sequence
  Chemically synthesized
gguucauaaucccaaagcgcaua

SEQ ID NO: 71839 - RNA, 23 nt, Artificial Sequence
  Chemically synthesized
agauuaaaauucagccuacaaac

SEQ ID NO: 71840 - RNA, 23 nt, Artificial Sequence
  Chemically synthesized
gauuaaaauucagccuacaaaca

SEQ ID NO: 71841 - RNA, 23 nt, Artificial Sequence
  Chemically synthesized
auuaaaauucagccuacaaacaa

SEQ ID NO: 71842 - RNA, 23 nt, Artificial Sequence
  Chemically synthesized
cuccuuaucauuaaggcgcgccc

SEQ ID NO: 71843 - RNA, 23 nt, Artificial Sequence
  Chemically synthesized
uccuuaucauuaaggcgcgccca

SEQ ID NO: 71844 - RNA, 23 nt, Artificial Sequence
  Chemically synthesized
ccuuaucauuaaggcgcgcccac

SEQ ID NO: 71845 - RNA, 23 nt, Artificial Sequence
  Chemically synthesized
cuuaucauuaaggcgcgcccacc

SEQ ID NO: 71846 - RNA, 23 nt, Artificial Sequence
  Chemically synthesized
uuaucauuaaggcgcgcccacca

SEQ ID NO: 71847 - RNA, 23 nt, Artificial Sequence
  Chemically synthesized
uuuccucgcacuuaucugcagca

SEQ ID NO: 71848 - RNA, 23 nt, Artificial Sequence
  Chemically synthesized
gauucaggaaccagagagaccac

SEQ ID NO: 71849 - RNA, 23 nt, Artificial Sequence
  Chemically synthesized
auucaggaaccagagagaccacc

SEQ ID NO: 71850 - RNA, 23 nt, Artificial Sequence
  Chemically synthesized
uucaggaaccagagagaccaccu

SEQ ID NO: 71851 - RNA, 23 nt, Artificial Sequence
  Chemically synthesized
guaauuuaguugggcugaguggc

SEQ ID NO: 71852 - RNA, 23 nt, Artificial Sequence
  Chemically synthesized
uaauuuaguugggcugaguggcc

SEQ ID NO: 71853 - RNA, 23 nt, Artificial Sequence
  Chemically synthesized
aauuuaguugggcugaguggccg

SEQ ID NO: 71854 - RNA, 23 nt, Artificial Sequence
  Chemically synthesized
auuuaguugggcugaguggccga

SEQ ID NO: 71855 - RNA, 23 nt, Artificial Sequence
  Chemically synthesized
uuuaguugggcugaguggccgag

SEQ ID NO: 71856 - RNA, 23 nt, Artificial Sequence
  Chemically synthesized
ggacuuucuugcuuagaaccugg

SEQ ID NO: 71857 - RNA, 23 nt, Artificial Sequence
  Chemically synthesized
gacuuucuugcuuagaaccugga

SEQ ID NO: 71858 - RNA, 23 nt, Artificial Sequence
  Chemically synthesized
acuuucuugcuuagaaccuggag

SEQ ID NO: 71859 - RNA, 23 nt, Artificial Sequence
  Chemically synthesized
cuuucuugcuuagaaccuggaga

SEQ ID NO: 71860 - RNA, 23 nt, Artificial Sequence
  Chemically synthesized
uggauauagggaccuacugcagc

SEQ ID NO: 71861 - RNA, 23 nt, Artificial Sequence
  Chemically synthesized
ggauauagggaccuacugcagcc

SEQ ID NO: 71862 - RNA, 23 nt, Artificial Sequence
  Chemically synthesized
gauauagggaccuacugcagcca

SEQ ID NO: 71863 - RNA, 23 nt, Artificial Sequence
  Chemically synthesized
auauagggaccuacugcagccac

SEQ ID NO: 71864 - RNA, 23 nt, Artificial Sequence
  Chemically synthesized
uauagggaccuacugcagccaca

SEQ ID NO: 71865 - RNA, 23 nt, Artificial Sequence
  Chemically synthesized
guuguagcuuggcauucugcucu

SEQ ID NO: 71866 - RNA, 23 nt, Artificial Sequence
  Chemically synthesized
uuguagcuuggcauucugcucuu

SEQ ID NO: 71867 - RNA, 23 nt, Artificial Sequence
  Chemically synthesized
uguagcuuggcauucugcucuug

SEQ ID NO: 71868 - RNA, 23 nt, Artificial Sequence
  Chemically synthesized
guagcuuggcauucugcucuuga

SEQ ID NO: 71869 - RNA, 23 nt, Artificial Sequence
  Chemically synthesized
uagcuuggcauucugcucuugau

SEQ ID NO: 71870 - RNA, 23 nt, Artificial Sequence
  Chemically synthesized
cucuucuguuccacguggccuuu

SEQ ID NO: 71871 - RNA, 23 nt, Artificial Sequence
  Chemically synthesized
ucuucuguuccacguggccuuua

SEQ ID NO: 71872 - RNA, 23 nt, Artificial Sequence
  Chemically synthesized
cuucuguuccacguggccuuuaa

SEQ ID NO: 71873 - RNA, 23 nt, Artificial Sequence
  Chemically synthesized
uucuguuccacguggccuuuaag

SEQ ID NO: 71874 - RNA, 23 nt, Artificial Sequence
  Chemically synthesized
cuuguugcuguugucgcugaucu

SEQ ID NO: 71875 - RNA, 23 nt, Artificial Sequence
  Chemically synthesized
uuguugcuguugucgcugaucuu

SEQ ID NO: 71876 - RNA, 23 nt, Artificial Sequence
  Chemically synthesized
uguugcuguugucgcugaucuug

SEQ ID NO: 71877 - RNA, 23 nt, Artificial Sequence
  Chemically synthesized
guugcuguugucgcugaucuugu

SEQ ID NO: 71878 - RNA, 23 nt, Artificial Sequence
  Chemically synthesized
uugcuguugucgcugaucuuguu

SEQ ID NO: 71879 - RNA, 23 nt, Artificial Sequence
  Chemically synthesized
acuuaucugcagcagucugcaug

SEQ ID NO: 71880 - RNA, 23 nt, Artificial Sequence
  Chemically synthesized
cuuaucugcagcagucugcaugu

SEQ ID NO: 71881 - RNA, 23 nt, Artificial Sequence
  Chemically synthesized
uuaucugcagcagucugcauguc

SEQ ID NO: 71882 - RNA, 23 nt, Artificial Sequence
  Chemically synthesized
uaucugcagcagucugcauguca

SEQ ID NO: 71883 - RNA, 23 nt, Artificial Sequence
  Chemically synthesized
aucugcagcagucugcaugucac

SEQ ID NO: 71884 - RNA, 23 nt, Artificial Sequence
  Chemically synthesized
ucuguuccacguggccuuuaagu

SEQ ID NO: 71885 - RNA, 23 nt, Artificial Sequence
  Chemically synthesized
cuguuccacguggccuuuaagug

SEQ ID NO: 71886 - RNA, 23 nt, Artificial Sequence
  Chemically synthesized
uguuccacguggccuuuaagugc

SEQ ID NO: 71887 - RNA, 23 nt, Artificial Sequence
  Chemically synthesized
guuccacguggccuuuaagugcu

SEQ ID NO: 71888 - RNA, 23 nt, Artificial Sequence
  Chemically synthesized
uuccacguggccuuuaagugcuc

SEQ ID NO: 71889 - RNA, 23 nt, Artificial Sequence
  Chemically synthesized
ggccuuuaagugcucucacuuuu

SEQ ID NO: 71890 - RNA, 23 nt, Artificial Sequence
  Chemically synthesized
gccuuuaagugcucucacuuuuu

SEQ ID NO: 71891 - RNA, 23 nt, Artificial Sequence
  Chemically synthesized
ccuuuaagugcucucacuuuuuu

SEQ ID NO: 71892 - RNA, 23 nt, Artificial Sequence
  Chemically synthesized
cuuuaagugcucucacuuuuuuu

SEQ ID NO: 71893 - RNA, 23 nt, Artificial Sequence
  Chemically synthesized
uuuaagugcucucacuuuuuuua

SEQ ID NO: 71894 - RNA, 23 nt, Artificial Sequence
  Chemically synthesized
ucuguuucagguucuggacugcc

SEQ ID NO: 71895 - RNA, 23 nt, Artificial Sequence
  Chemically synthesized
cuguuucagguucuggacugcca

SEQ ID NO: 71896 - RNA, 23 nt, Artificial Sequence
  Chemically synthesized
uguuucagguucuggacugccag

SEQ ID NO: 71897 - RNA, 23 nt, Artificial Sequence
  Chemically synthesized
guuucagguucuggacugccagg

SEQ ID NO: 71898 - RNA, 23 nt, Artificial Sequence
  Chemically synthesized
uuucagguucuggacugccaggc

SEQ ID NO: 71899 - RNA, 23 nt, Artificial Sequence
  Chemically synthesized
ugcuguagagcugccuucuucuu

SEQ ID NO: 71900 - RNA, 23 nt, Artificial Sequence
  Chemically synthesized
uuguuucuuagcugcagcuccuu

SEQ ID NO: 71901 - RNA, 23 nt, Artificial Sequence
  Chemically synthesized
uguuucuuagcugcagcuccuua

SEQ ID NO: 71902 - RNA, 23 nt, Artificial Sequence
  Chemically synthesized
guuucuuagcugcagcuccuuau

SEQ ID NO: 71903 - RNA, 23 nt, Artificial Sequence
  Chemically synthesized
uuucuuagcugcagcuccuuaua

SEQ ID NO: 71904 - RNA, 23 nt, Artificial Sequence
  Chemically synthesized
cggcaucaucuuggacccgaacc

SEQ ID NO: 71905 - RNA, 23 nt, Artificial Sequence
  Chemically synthesized
ggcaucaucuuggacccgaaccg

SEQ ID NO: 71906 - RNA, 23 nt, Artificial Sequence
  Chemically synthesized
gcaucaucuuggacccgaaccgc

SEQ ID NO: 71907 - RNA, 23 nt, Artificial Sequence
  Chemically synthesized
caucaucuuggacccgaaccgca

SEQ ID NO: 71908 - RNA, 23 nt, Artificial Sequence
  Chemically synthesized
aucaucuuggacccgaaccgcau

SEQ ID NO: 71909 - RNA, 23 nt, Artificial Sequence
  Chemically synthesized
uacacgguaagaaacaucggcau

SEQ ID NO: 71910 - RNA, 23 nt, Artificial Sequence
  Chemically synthesized
ucuucgucuucccuguggaugau

SEQ ID NO: 71911 - RNA, 23 nt, Artificial Sequence
  Chemically synthesized
cuucgucuucccuguggaugauu

SEQ ID NO: 71912 - RNA, 23 nt, Artificial Sequence
  Chemically synthesized
uucgucuucccuguggaugauug

SEQ ID NO: 71913 - RNA, 23 nt, Artificial Sequence
  Chemically synthesized
ugguccacucacaaugucccugc

SEQ ID NO: 71914 - RNA, 23 nt, Artificial Sequence
  Chemically synthesized
agcauugugaagagccgugaugc

SEQ ID NO: 71915 - RNA, 23 nt, Artificial Sequence
  Chemically synthesized
gcauugugaagagccgugaugcc

SEQ ID NO: 71916 - RNA, 23 nt, Artificial Sequence
  Chemically synthesized
cauugugaagagccgugaugccu

SEQ ID NO: 71917 - RNA, 23 nt, Artificial Sequence
  Chemically synthesized
auugugaagagccgugaugccuu

SEQ ID NO: 71918 - RNA, 23 nt, Artificial Sequence
  Chemically synthesized
uugugaagagccgugaugccuuc

SEQ ID NO: 71919 - RNA, 23 nt, Artificial Sequence
  Chemically synthesized
uccuuuuaccaggaggcagagag

SEQ ID NO: 71920 - RNA, 23 nt, Artificial Sequence
  Chemically synthesized
ccuuuuaccaggaggcagagaga

SEQ ID NO: 71921 - RNA, 23 nt, Artificial Sequence
  Chemically synthesized
cuuuuaccaggaggcagagagac

SEQ ID NO: 71922 - RNA, 23 nt, Artificial Sequence
  Chemically synthesized
uuuuaccaggaggcagagagacc

SEQ ID NO: 71923 - RNA, 23 nt, Artificial Sequence
  Chemically synthesized
uuuaccaggaggcagagagaccu

SEQ ID NO: 71924 - RNA, 23 nt, Artificial Sequence
  Chemically synthesized
gggcuuucugagcuggcagucac

SEQ ID NO: 71925 - RNA, 23 nt, Artificial Sequence
  Chemically synthesized
ggcuuucugagcuggcagucaca

SEQ ID NO: 71926 - RNA, 23 nt, Artificial Sequence
  Chemically synthesized
gcuuucugagcuggcagucacag

SEQ ID NO: 71927 - RNA, 23 nt, Artificial Sequence
  Chemically synthesized
cuuucugagcuggcagucacaga

SEQ ID NO: 71928 - RNA, 23 nt, Artificial Sequence
  Chemically synthesized
uuucugagcuggcagucacagaa

SEQ ID NO: 71929 - RNA, 23 nt, Artificial Sequence
  Chemically synthesized
uucuuuagaggccuuggugcguu

SEQ ID NO: 71930 - RNA, 23 nt, Artificial Sequence
  Chemically synthesized
ucuuuagaggccuuggugcguua

SEQ ID NO: 71931 - RNA, 23 nt, Artificial Sequence
  Chemically synthesized
uuugcaaccugagcaucccgcaa

SEQ ID NO: 71932 - RNA, 23 nt, Artificial Sequence
  Chemically synthesized
aauauuacggguaagucuguagc

SEQ ID NO: 71933 - RNA, 23 nt, Artificial Sequence
  Chemically synthesized
auauuacggguaagucuguagca

SEQ ID NO: 71934 - RNA, 23 nt, Artificial Sequence
  Chemically synthesized
uauuacggguaagucuguagcaa

SEQ ID NO: 71935 - RNA, 23 nt, Artificial Sequence
  Chemically synthesized
auuacggguaagucuguagcaag

SEQ ID NO: 71936 - RNA, 23 nt, Artificial Sequence
  Chemically synthesized
uuacggguaagucuguagcaagu

SEQ ID NO: 71937 - RNA, 23 nt, Artificial Sequence
  Chemically synthesized
uggugaauucuucaauccuucau

SEQ ID NO: 71938 - RNA, 23 nt, Artificial Sequence
  Chemically synthesized
ggugaauucuucaauccuucauu

SEQ ID NO: 71939 - RNA, 23 nt, Artificial Sequence
  Chemically synthesized
acuguaggucauggcaaacacag

SEQ ID NO: 71940 - RNA, 23 nt, Artificial Sequence
  Chemically synthesized
cuguaggucauggcaaacacagc

SEQ ID NO: 71941 - RNA, 23 nt, Artificial Sequence
  Chemically synthesized
uguaggucauggcaaacacagcg

SEQ ID NO: 71942 - RNA, 23 nt, Artificial Sequence
  Chemically synthesized
guaggucauggcaaacacagcgg

SEQ ID NO: 71943 - RNA, 23 nt, Artificial Sequence
  Chemically synthesized
uaggucauggcaaacacagcggc

SEQ ID NO: 71944 - RNA, 23 nt, Artificial Sequence
  Chemically synthesized
ggcguucaugacgaaggaagaag

SEQ ID NO: 71945 - RNA, 23 nt, Artificial Sequence
  Chemically synthesized
gcguucaugacgaaggaagaagc

SEQ ID NO: 71946 - RNA, 23 nt, Artificial Sequence
  Chemically synthesized
cguucaugacgaaggaagaagcg

SEQ ID NO: 71947 - RNA, 23 nt, Artificial Sequence
  Chemically synthesized
guucaugacgaaggaagaagcga

SEQ ID NO: 71948 - RNA, 23 nt, Artificial Sequence
  Chemically synthesized
uucaugacgaaggaagaagcgaa

SEQ ID NO: 71949 - RNA, 23 nt, Artificial Sequence
  Chemically synthesized
aguuuguccuuuuaccaggaggc

SEQ ID NO: 71950 - RNA, 23 nt, Artificial Sequence
  Chemically synthesized
guuuguccuuuuaccaggaggca

SEQ ID NO: 71951 - RNA, 23 nt, Artificial Sequence
  Chemically synthesized
uuuguccuuuuaccaggaggcag

SEQ ID NO: 71952 - RNA, 23 nt, Artificial Sequence
  Chemically synthesized
uuguccuuuuaccaggaggcaga

SEQ ID NO: 71953 - RNA, 23 nt, Artificial Sequence
  Chemically synthesized
acuguugacaacugcugagaacu

SEQ ID NO: 71954 - RNA, 23 nt, Artificial Sequence
  Chemically synthesized
cuguugacaacugcugagaacuu

SEQ ID NO: 71955 - RNA, 23 nt, Artificial Sequence
  Chemically synthesized
uguugacaacugcugagaacuuc

SEQ ID NO: 71956 - RNA, 23 nt, Artificial Sequence
  Chemically synthesized
guugacaacugcugagaacuucc

SEQ ID NO: 71957 - RNA, 23 nt, Artificial Sequence
  Chemically synthesized
ucacugcucugguucuuccucag

SEQ ID NO: 71958 - RNA, 23 nt, Artificial Sequence
  Chemically synthesized
ucgauauucaccaggaacuuuua

SEQ ID NO: 71959 - RNA, 23 nt, Artificial Sequence
  Chemically synthesized
uggguacagucccagcaaguuac

SEQ ID NO: 71960 - RNA, 23 nt, Artificial Sequence
  Chemically synthesized
ggguacagucccagcaaguuacg

SEQ ID NO: 71961 - RNA, 23 nt, Artificial Sequence
  Chemically synthesized
gguacagucccagcaaguuacgu

SEQ ID NO: 71962 - RNA, 23 nt, Artificial Sequence
  Chemically synthesized
agccucuggauuugguucuucug

SEQ ID NO: 71963 - RNA, 23 nt, Artificial Sequence
  Chemically synthesized
gccucuggauuugguucuucugg

SEQ ID NO: 71964 - RNA, 23 nt, Artificial Sequence
  Chemically synthesized
uucguuccucugacuuccaaauc

SEQ ID NO: 71965 - RNA, 23 nt, Artificial Sequence
  Chemically synthesized
ucuaggucagcaucacucugguu

SEQ ID NO: 71966 - RNA, 23 nt, Artificial Sequence
  Chemically synthesized
cuaggucagcaucacucugguuu

SEQ ID NO: 71967 - RNA, 23 nt, Artificial Sequence
  Chemically synthesized
uaggucagcaucacucugguuuc

SEQ ID NO: 71968 - RNA, 23 nt, Artificial Sequence
  Chemically synthesized
aggucaaauucucccuccaaaga

SEQ ID NO: 71969 - RNA, 23 nt, Artificial Sequence
  Chemically synthesized
ugacuuccaaaucguugaagaac

SEQ ID NO: 71970 - RNA, 23 nt, Artificial Sequence
  Chemically synthesized
gacuuccaaaucguugaagaaca

SEQ ID NO: 71971 - RNA, 23 nt, Artificial Sequence
  Chemically synthesized
acuuccaaaucguugaagaacau

SEQ ID NO: 71972 - RNA, 23 nt, Artificial Sequence
  Chemically synthesized
cuuccaaaucguugaagaacauc

SEQ ID NO: 71973 - RNA, 23 nt, Artificial Sequence
  Chemically synthesized
uuccaaaucguugaagaacauca

SEQ ID NO: 71974 - RNA, 23 nt, Artificial Sequence
  Chemically synthesized
ugaauauuuggcccauuaggacc

SEQ ID NO: 71975 - RNA, 23 nt, Artificial Sequence
  Chemically synthesized
gaauauuuggcccauuaggaccc

SEQ ID NO: 71976 - RNA, 23 nt, Artificial Sequence
  Chemically synthesized
aauauuuggcccauuaggacccu

SEQ ID NO: 71977 - RNA, 23 nt, Artificial Sequence
  Chemically synthesized
auauuuggcccauuaggacccuc

SEQ ID NO: 71978 - RNA, 23 nt, Artificial Sequence
  Chemically synthesized
uauuuggcccauuaggacccucu

SEQ ID NO: 71979 - RNA, 23 nt, Artificial Sequence
  Chemically synthesized
uguuuugguuuuguaggaacagg

SEQ ID NO: 71980 - RNA, 23 nt, Artificial Sequence
  Chemically synthesized
guuuugguuuuguaggaacagga

SEQ ID NO: 71981 - RNA, 23 nt, Artificial Sequence
  Chemically synthesized
uuuugguuuuguaggaacaggag

SEQ ID NO: 71982 - RNA, 23 nt, Artificial Sequence
  Chemically synthesized
uuugguuuuguaggaacaggagg

SEQ ID NO: 71983 - RNA, 23 nt, Artificial Sequence
  Chemically synthesized
uugguuuuguaggaacaggaggu

SEQ ID NO: 71984 - RNA, 23 nt, Artificial Sequence
  Chemically synthesized
ucaauuuccuccacaaguuuccc

SEQ ID NO: 71985 - RNA, 23 nt, Artificial Sequence
  Chemically synthesized
ucugugaagugcugcucauuguu

SEQ ID NO: 71986 - RNA, 23 nt, Artificial Sequence
  Chemically synthesized
cugugaagugcugcucauuguua

SEQ ID NO: 71987 - RNA, 23 nt, Artificial Sequence
  Chemically synthesized
ucuucaucgcuuucaagcuacau

SEQ ID NO: 71988 - RNA, 23 nt, Artificial Sequence
  Chemically synthesized
cuucaucgcuuucaagcuacauu

SEQ ID NO: 71989 - RNA, 23 nt, Artificial Sequence
  Chemically synthesized
uucaagcuacauugucauuaaaa

SEQ ID NO: 71990 - RNA, 23 nt, Artificial Sequence
  Chemically synthesized
ucaagcuacauugucauuaaaau

SEQ ID NO: 71991 - RNA, 23 nt, Artificial Sequence
  Chemically synthesized
ggcauucugcucuugauucaauu

SEQ ID NO: 71992 - RNA, 23 nt, Artificial Sequence
  Chemically synthesized
gcauucugcucuugauucaauuu

SEQ ID NO: 71993 - RNA, 23 nt, Artificial Sequence
  Chemically synthesized
ccacugcagacugauugucaugg

SEQ ID NO: 71994 - RNA, 23 nt, Artificial Sequence
  Chemically synthesized
cacugcagacugauugucauggu

SEQ ID NO: 71995 - RNA, 23 nt, Artificial Sequence
  Chemically synthesized
acugcagacugauugucauggug

SEQ ID NO: 71996 - RNA, 23 nt, Artificial Sequence
  Chemically synthesized
cugcagacugauugucauggugg

SEQ ID NO: 71997 - RNA, 23 nt, Artificial Sequence
  Chemically synthesized
ugcagacugauugucaugguggc

SEQ ID NO: 71998 - RNA, 23 nt, Artificial Sequence
  Chemically synthesized
aguuucuccugcucagcaacuug

SEQ ID NO: 71999 - RNA, 23 nt, Artificial Sequence
  Chemically synthesized
guuucuccugcucagcaacuugu

SEQ ID NO: 72000 - RNA, 23 nt, Artificial Sequence
  Chemically synthesized
uuucuccugcucagcaacuuguu

SEQ ID NO: 72001 - RNA, 23 nt, Artificial Sequence
  Chemically synthesized
uucuccugcucagcaacuuguug

SEQ ID NO: 72002 - RNA, 23 nt, Artificial Sequence
  Chemically synthesized
ucuccugcucagcaacuuguugc

SEQ ID NO: 72003 - RNA, 23 nt, Artificial Sequence
  Chemically synthesized
gcaauuguugcugggcuucaauc

SEQ ID NO: 72004 - RNA, 23 nt, Artificial Sequence
  Chemically synthesized
caauuguugcugggcuucaaucu

SEQ ID NO: 72005 - RNA, 23 nt, Artificial Sequence
  Chemically synthesized
aauuguugcugggcuucaaucug

SEQ ID NO: 72006 - RNA, 23 nt, Artificial Sequence
  Chemically synthesized
aaauucuguguggaaguuucagg

SEQ ID NO: 72007 - RNA, 23 nt, Artificial Sequence
  Chemically synthesized
aauucuguguggaaguuucaggc

SEQ ID NO: 72008 - RNA, 23 nt, Artificial Sequence
  Chemically synthesized
auucuguguggaaguuucaggcc

SEQ ID NO: 72009 - RNA, 23 nt, Artificial Sequence
  Chemically synthesized
uucuguguggaaguuucaggcca

SEQ ID NO: 72010 - RNA, 23 nt, Artificial Sequence
  Chemically synthesized
ucuguguggaaguuucaggccaa

SEQ ID NO: 72011 - RNA, 23 nt, Artificial Sequence
  Chemically synthesized
gagcuggcaugucacuguucucu

SEQ ID NO: 72012 - RNA, 23 nt, Artificial Sequence
  Chemically synthesized
agcuggcaugucacuguucucug

SEQ ID NO: 72013 - RNA, 23 nt, Artificial Sequence
  Chemically synthesized
gcuggcaugucacuguucucugu

SEQ ID NO: 72014 - RNA, 23 nt, Artificial Sequence
  Chemically synthesized
cuggcaugucacuguucucugua

SEQ ID NO: 72015 - RNA, 23 nt, Artificial Sequence
  Chemically synthesized
uggcaugucacuguucucuguac

SEQ ID NO: 72016 - RNA, 23 nt, Artificial Sequence
  Chemically synthesized
uucuuucguaaggcuucuagguc

SEQ ID NO: 72017 - RNA, 23 nt, Artificial Sequence
  Chemically synthesized
ucuuucguaaggcuucuagguca

SEQ ID NO: 72018 - RNA, 23 nt, Artificial Sequence
  Chemically synthesized
cgccugcuguugcguauacaugg

SEQ ID NO: 72019 - RNA, 23 nt, Artificial Sequence
  Chemically synthesized
gccugcuguugcguauacaugga

SEQ ID NO: 72020 - RNA, 23 nt, Artificial Sequence
  Chemically synthesized
ccugcuguugcguauacauggaa

SEQ ID NO: 72021 - RNA, 23 nt, Artificial Sequence
  Chemically synthesized
cugcuguugcguauacauggaau

SEQ ID NO: 72022 - RNA, 23 nt, Artificial Sequence
  Chemically synthesized
ugcuguugcguauacauggaaua

SEQ ID NO: 72023 - RNA, 23 nt, Artificial Sequence
  Chemically synthesized
cauugagaacggacgcacuuucu

SEQ ID NO: 72024 - RNA, 23 nt, Artificial Sequence
  Chemically synthesized
auugagaacggacgcacuuucuu

SEQ ID NO: 72025 - RNA, 23 nt, Artificial Sequence
  Chemically synthesized
uugagaacggacgcacuuucuuc

SEQ ID NO: 72026 - RNA, 23 nt, Artificial Sequence
  Chemically synthesized
agccuuggcuugggaaaagaucu

SEQ ID NO: 72027 - RNA, 23 nt, Artificial Sequence
  Chemically synthesized
gccuuggcuugggaaaagaucug

SEQ ID NO: 72028 - RNA, 23 nt, Artificial Sequence
  Chemically synthesized
ccuuggcuugggaaaagaucugc

SEQ ID NO: 72029 - RNA, 23 nt, Artificial Sequence
  Chemically synthesized
cuuggcuugggaaaagaucugca

SEQ ID NO: 72030 - RNA, 23 nt, Artificial Sequence
  Chemically synthesized
uuggcuugggaaaagaucugcau

SEQ ID NO: 72031 - RNA, 23 nt, Artificial Sequence
  Chemically synthesized
gcuuagcuuccugauucucagcu

SEQ ID NO: 72032 - RNA, 23 nt, Artificial Sequence
  Chemically synthesized
cuuagcuuccugauucucagcua

SEQ ID NO: 72033 - RNA, 23 nt, Artificial Sequence
  Chemically synthesized
uuagcuuccugauucucagcuau

SEQ ID NO: 72034 - RNA, 23 nt, Artificial Sequence
  Chemically synthesized
ucacugacaaccaacuaacaguu

SEQ ID NO: 72035 - RNA, 23 nt, Artificial Sequence
  Chemically synthesized
gagcacugaguguagccuuccuc

SEQ ID NO: 72036 - RNA, 23 nt, Artificial Sequence
  Chemically synthesized
agcacugaguguagccuuccucc

SEQ ID NO: 72037 - RNA, 23 nt, Artificial Sequence
  Chemically synthesized
gcacugaguguagccuuccucca

SEQ ID NO: 72038 - RNA, 23 nt, Artificial Sequence
  Chemically synthesized
cacugaguguagccuuccuccau

SEQ ID NO: 72039 - RNA, 23 nt, Artificial Sequence
  Chemically synthesized
acugaguguagccuuccuccauu

SEQ ID NO: 72040 - RNA, 23 nt, Artificial Sequence
  Chemically synthesized
gguccacucacaaugucccugcc

SEQ ID NO: 72041 - RNA, 23 nt, Artificial Sequence
  Chemically synthesized
guccacucacaaugucccugcca

SEQ ID NO: 72042 - RNA, 23 nt, Artificial Sequence
  Chemically synthesized
uccacucacaaugucccugccag

SEQ ID NO: 72043 - RNA, 23 nt, Artificial Sequence
  Chemically synthesized
cucauuccaugagcgauacgcuc

SEQ ID NO: 72044 - RNA, 23 nt, Artificial Sequence
  Chemically synthesized
ucauuccaugagcgauacgcucu

SEQ ID NO: 72045 - RNA, 23 nt, Artificial Sequence
  Chemically synthesized
cauuccaugagcgauacgcucug

SEQ ID NO: 72046 - RNA, 23 nt, Artificial Sequence
  Chemically synthesized
auuccaugagcgauacgcucuga

SEQ ID NO: 72047 - RNA, 23 nt, Artificial Sequence
  Chemically synthesized
uuccaugagcgauacgcucugag

SEQ ID NO: 72048 - RNA, 23 nt, Artificial Sequence
  Chemically synthesized
agccaguuuuacgcaaguuuguc

SEQ ID NO: 72049 - RNA, 23 nt, Artificial Sequence
  Chemically synthesized
cgaacuucguuccucugacuucc

SEQ ID NO: 72050 - RNA, 23 nt, Artificial Sequence
  Chemically synthesized
gaacuucguuccucugacuucca

SEQ ID NO: 72051 - RNA, 23 nt, Artificial Sequence
  Chemically synthesized
aacuucguuccucugacuuccaa

SEQ ID NO: 72052 - RNA, 23 nt, Artificial Sequence
  Chemically synthesized
acuucguuccucugacuuccaaa

SEQ ID NO: 72053 - RNA, 23 nt, Artificial Sequence
  Chemically synthesized
cuucguuccucugacuuccaaau

SEQ ID NO: 72054 - RNA, 23 nt, Artificial Sequence
  Chemically synthesized
caaaucguugaagaacaucaaac

SEQ ID NO: 72055 - RNA, 23 nt, Artificial Sequence
  Chemically synthesized
aaaucguugaagaacaucaaaca

SEQ ID NO: 72056 - RNA, 23 nt, Artificial Sequence
  Chemically synthesized
aaucguugaagaacaucaaacau

SEQ ID NO: 72057 - RNA, 23 nt, Artificial Sequence
  Chemically synthesized
aucguugaagaacaucaaacauu

SEQ ID NO: 72058 - RNA, 23 nt, Artificial Sequence
  Chemically synthesized
ucguugaagaacaucaaacauuc

SEQ ID NO: 72059 - RNA, 23 nt, Artificial Sequence
  Chemically synthesized
guccucugauauaaaagcuucug

SEQ ID NO: 72060 - RNA, 23 nt, Artificial Sequence
  Chemically synthesized
uccucugauauaaaagcuucuga

SEQ ID NO: 72061 - RNA, 23 nt, Artificial Sequence
  Chemically synthesized
ccucugauauaaaagcuucugaa

SEQ ID NO: 72062 - RNA, 23 nt, Artificial Sequence
  Chemically synthesized
cucugauauaaaagcuucugaau

SEQ ID NO: 72063 - RNA, 23 nt, Artificial Sequence
  Chemically synthesized
ucugauauaaaagcuucugaaua

SEQ ID NO: 72064 - RNA, 23 nt, Artificial Sequence
  Chemically synthesized
uccaugacugccacuucugaauu

SEQ ID NO: 72065 - RNA, 23 nt, Artificial Sequence
  Chemically synthesized
ugccauuuccugaaguucagcaa

SEQ ID NO: 72066 - RNA, 23 nt, Artificial Sequence
  Chemically synthesized
uauuguucacugacaaccaacua

SEQ ID NO: 72067 - RNA, 23 nt, Artificial Sequence
  Chemically synthesized
gguaagaaacaucggcaucaucu

SEQ ID NO: 72068 - RNA, 23 nt, Artificial Sequence
  Chemically synthesized
guaagaaacaucggcaucaucuu

SEQ ID NO: 72069 - RNA, 23 nt, Artificial Sequence
  Chemically synthesized
uaagaaacaucggcaucaucuug

SEQ ID NO: 72070 - RNA, 23 nt, Artificial Sequence
  Chemically synthesized
uugaacuugcugccacggucugg

SEQ ID NO: 72071 - RNA, 23 nt, Artificial Sequence
  Chemically synthesized
guuguuguagcuuggcauucugc

SEQ ID NO: 72072 - RNA, 23 nt, Artificial Sequence
  Chemically synthesized
uuguuguagcuuggcauucugcu

SEQ ID NO: 72073 - RNA, 23 nt, Artificial Sequence
  Chemically synthesized
uguuguagcuuggcauucugcuc

SEQ ID NO: 72074 - RNA, 23 nt, Artificial Sequence
  Chemically synthesized
aaguuucuccugcucagcaacuu

SEQ ID NO: 72075 - RNA, 23 nt, Artificial Sequence
  Chemically synthesized
acgcuaaauguccucuaauggug

SEQ ID NO: 72076 - RNA, 23 nt, Artificial Sequence
  Chemically synthesized
cgcuaaauguccucuaaugguga

SEQ ID NO: 72077 - RNA, 23 nt, Artificial Sequence
  Chemically synthesized
gcuaaauguccucuaauggugaa

SEQ ID NO: 72078 - RNA, 23 nt, Artificial Sequence
  Chemically synthesized
cuaaauguccucuaauggugaau

SEQ ID NO: 72079 - RNA, 23 nt, Artificial Sequence
  Chemically synthesized
uaaauguccucuaauggugaauu

SEQ ID NO: 72080 - RNA, 23 nt, Artificial Sequence
  Chemically synthesized
uaagucuugugaaauuuuugcca

SEQ ID NO: 72081 - RNA, 23 nt, Artificial Sequence
  Chemically synthesized
aagucuugugaaauuuuugccaa

SEQ ID NO: 72082 - RNA, 23 nt, Artificial Sequence
  Chemically synthesized
agucuugugaaauuuuugccaaa

SEQ ID NO: 72083 - RNA, 23 nt, Artificial Sequence
  Chemically synthesized
gucuugugaaauuuuugccaaaa

SEQ ID NO: 72084 - RNA, 23 nt, Artificial Sequence
  Chemically synthesized
ucuugugaaauuuuugccaaaaa

SEQ ID NO: 72085 - RNA, 23 nt, Artificial Sequence
  Chemically synthesized
uguccuuuuaccaggaggcagag

SEQ ID NO: 72086 - RNA, 23 nt, Artificial Sequence
  Chemically synthesized
cguuuucaugguucuccugaacu

SEQ ID NO: 72087 - RNA, 23 nt, Artificial Sequence
  Chemically synthesized
guuuucaugguucuccugaacug

SEQ ID NO: 72088 - RNA, 23 nt, Artificial Sequence
  Chemically synthesized
uuuucaugguucuccugaacuga

SEQ ID NO: 72089 - RNA, 23 nt, Artificial Sequence
  Chemically synthesized
uuucaugguucuccugaacugaa

SEQ ID NO: 72090 - RNA, 23 nt, Artificial Sequence
  Chemically synthesized
uucaugguucuccugaacugaag

SEQ ID NO: 72091 - RNA, 23 nt, Artificial Sequence
  Chemically synthesized
acugauugucaugguggcugucg

SEQ ID NO: 72092 - RNA, 23 nt, Artificial Sequence
  Chemically synthesized
cugauugucaugguggcugucga

SEQ ID NO: 72093 - RNA, 23 nt, Artificial Sequence
  Chemically synthesized
ugauugucaugguggcugucgau

SEQ ID NO: 72094 - RNA, 23 nt, Artificial Sequence
  Chemically synthesized
gauugucaugguggcugucgauc

SEQ ID NO: 72095 - RNA, 23 nt, Artificial Sequence
  Chemically synthesized
auugucaugguggcugucgaucc

SEQ ID NO: 72096 - RNA, 23 nt, Artificial Sequence
  Chemically synthesized
gccguucuugagcaucucuagcu

SEQ ID NO: 72097 - RNA, 23 nt, Artificial Sequence
  Chemically synthesized
ccguucuugagcaucucuagcug

SEQ ID NO: 72098 - RNA, 23 nt, Artificial Sequence
  Chemically synthesized
cguucuugagcaucucuagcugc

SEQ ID NO: 72099 - RNA, 23 nt, Artificial Sequence
  Chemically synthesized
uuaagugcucucacuuuuuuuag

SEQ ID NO: 72100 - RNA, 23 nt, Artificial Sequence
  Chemically synthesized
auucuuggguacagucccagcaa

SEQ ID NO: 72101 - RNA, 23 nt, Artificial Sequence
  Chemically synthesized
uucuuggguacagucccagcaag

SEQ ID NO: 72102 - RNA, 23 nt, Artificial Sequence
  Chemically synthesized
aaguuacguggaacauaucccuc

SEQ ID NO: 72103 - RNA, 23 nt, Artificial Sequence
  Chemically synthesized
aguuacguggaacauaucccucc

SEQ ID NO: 72104 - RNA, 23 nt, Artificial Sequence
  Chemically synthesized
guuacguggaacauaucccuccu

SEQ ID NO: 72105 - RNA, 23 nt, Artificial Sequence
  Chemically synthesized
uuacguggaacauaucccuccuu

SEQ ID NO: 72106 - RNA, 23 nt, Artificial Sequence
  Chemically synthesized
uacguggaacauaucccuccuua

SEQ ID NO: 72107 - RNA, 23 nt, Artificial Sequence
  Chemically synthesized
ucaugacgaaggaagaagcgaac

SEQ ID NO: 72108 - RNA, 23 nt, Artificial Sequence
  Chemically synthesized
ggacucccucaggcucauaauca

SEQ ID NO: 72109 - RNA, 23 nt, Artificial Sequence
  Chemically synthesized
gacucccucaggcucauaaucaa

SEQ ID NO: 72110 - RNA, 23 nt, Artificial Sequence
  Chemically synthesized
acucccucaggcucauaaucaag

SEQ ID NO: 72111 - RNA, 23 nt, Artificial Sequence
  Chemically synthesized
auauggauucuggauuucuacug

SEQ ID NO: 72112 - RNA, 23 nt, Artificial Sequence
  Chemically synthesized
cuuucguaaggcuucuaggucag

SEQ ID NO: 72113 - RNA, 23 nt, Artificial Sequence
  Chemically synthesized
uuucguaaggcuucuaggucagc

SEQ ID NO: 72114 - RNA, 23 nt, Artificial Sequence
  Chemically synthesized
uucguaaggcuucuaggucagca

SEQ ID NO: 72115 - RNA, 23 nt, Artificial Sequence
  Chemically synthesized
uugaaggacuccaaucagggcca

SEQ ID NO: 72116 - RNA, 23 nt, Artificial Sequence
  Chemically synthesized
auaguagacgacuggauauaggg

SEQ ID NO: 72117 - RNA, 23 nt, Artificial Sequence
  Chemically synthesized
uaguagacgacuggauauaggga

SEQ ID NO: 72118 - RNA, 23 nt, Artificial Sequence
  Chemically synthesized
aguagacgacuggauauagggac

SEQ ID NO: 72119 - RNA, 23 nt, Artificial Sequence
  Chemically synthesized
guagacgacuggauauagggacc

SEQ ID NO: 72120 - RNA, 23 nt, Artificial Sequence
  Chemically synthesized
uagacgacuggauauagggaccu

SEQ ID NO: 72121 - RNA, 23 nt, Artificial Sequence
  Chemically synthesized
uccuuauagaggcgaucaagcuc

SEQ ID NO: 72122 - RNA, 23 nt, Artificial Sequence
  Chemically synthesized
ccuuauagaggcgaucaagcuca

SEQ ID NO: 72123 - RNA, 23 nt, Artificial Sequence
  Chemically synthesized
cuuauagaggcgaucaagcucag

SEQ ID NO: 72124 - RNA, 23 nt, Artificial Sequence
  Chemically synthesized
uuauagaggcgaucaagcucagc

SEQ ID NO: 72125 - RNA, 23 nt, Artificial Sequence
  Chemically synthesized
uauagaggcgaucaagcucagcc

SEQ ID NO: 72126 - RNA, 23 nt, Artificial Sequence
  Chemically synthesized
uuaguugccagcaauuguugcug

SEQ ID NO: 72127 - RNA, 23 nt, Artificial Sequence
  Chemically synthesized
uaguugccagcaauuguugcugg

SEQ ID NO: 72128 - RNA, 23 nt, Artificial Sequence
  Chemically synthesized
aguugccagcaauuguugcuggg

SEQ ID NO: 72129 - RNA, 23 nt, Artificial Sequence
  Chemically synthesized
guugccagcaauuguugcugggc

SEQ ID NO: 72130 - RNA, 23 nt, Artificial Sequence
  Chemically synthesized
uugccagcaauuguugcugggcu

SEQ ID NO: 72131 - RNA, 23 nt, Artificial Sequence
  Chemically synthesized
cuaauuacugguaccguagcuua

SEQ ID NO: 72132 - RNA, 23 nt, Artificial Sequence
  Chemically synthesized
aucccuccuuaucauuaaggcgc

SEQ ID NO: 72133 - RNA, 23 nt, Artificial Sequence
  Chemically synthesized
ucccuccuuaucauuaaggcgcg

SEQ ID NO: 72134 - RNA, 23 nt, Artificial Sequence
  Chemically synthesized
cccuccuuaucauuaaggcgcgc

SEQ ID NO: 72135 - RNA, 23 nt, Artificial Sequence
  Chemically synthesized
ccuccuuaucauuaaggcgcgcc

SEQ ID NO: 72136 - RNA, 23 nt, Artificial Sequence
  Chemically synthesized
ucucugggugcugcuguugauuc

SEQ ID NO: 72137 - RNA, 23 nt, Artificial Sequence
  Chemically synthesized
cucugggugcugcuguugauucu

SEQ ID NO: 72138 - RNA, 23 nt, Artificial Sequence
  Chemically synthesized
ucugggugcugcuguugauucug

SEQ ID NO: 72139 - RNA, 23 nt, Artificial Sequence
  Chemically synthesized
gccccucugaagccugaaugacc

SEQ ID NO: 72140 - RNA, 23 nt, Artificial Sequence
  Chemically synthesized
uuccaucagaugaaacugguaga

SEQ ID NO: 72141 - RNA, 23 nt, Artificial Sequence
  Chemically synthesized
cuagagacauucuucaucgcuuu

SEQ ID NO: 72142 - RNA, 23 nt, Artificial Sequence
  Chemically synthesized
aauaagucuugugaaauuuuugc

SEQ ID NO: 72143 - RNA, 23 nt, Artificial Sequence
  Chemically synthesized
auaagucuugugaaauuuuugcc

SEQ ID NO: 72144 - RNA, 23 nt, Artificial Sequence
  Chemically synthesized
caaguuacguggaacauaucccu

SEQ ID NO: 72145 - RNA, 23 nt, Artificial Sequence
  Chemically synthesized
acguggaacauaucccuccuuau

SEQ ID NO: 72146 - RNA, 23 nt, Artificial Sequence
  Chemically synthesized
ugucaugcagucuccuucuuuca

SEQ ID NO: 72147 - RNA, 23 nt, Artificial Sequence
  Chemically synthesized
acaauguaauggaguccauccau

SEQ ID NO: 72148 - RNA, 23 nt, Artificial Sequence
  Chemically synthesized
caauguaauggaguccauccauc

SEQ ID NO: 72149 - RNA, 23 nt, Artificial Sequence
  Chemically synthesized
aauguaauggaguccauccauca

SEQ ID NO: 72150 - RNA, 23 nt, Artificial Sequence
  Chemically synthesized
ugaaaaguguggcccucugguau

SEQ ID NO: 72151 - RNA, 23 nt, Artificial Sequence
  Chemically synthesized
aaccuggagaaagggucuggucu

SEQ ID NO: 72152 - RNA, 23 nt, Artificial Sequence
  Chemically synthesized
accuggagaaagggucuggucuu

SEQ ID NO: 72153 - RNA, 23 nt, Artificial Sequence
  Chemically synthesized
ccuggagaaagggucuggucuug

SEQ ID NO: 72154 - RNA, 23 nt, Artificial Sequence
  Chemically synthesized
ggucuuggccaaccgaagguaug

SEQ ID NO: 72155 - RNA, 23 nt, Artificial Sequence
  Chemically synthesized
gucuuggccaaccgaagguaugc

SEQ ID NO: 72156 - RNA, 23 nt, Artificial Sequence
  Chemically synthesized
ucuuggccaaccgaagguaugcu

SEQ ID NO: 72157 - RNA, 23 nt, Artificial Sequence
  Chemically synthesized
cuuggccaaccgaagguaugcug

SEQ ID NO: 72158 - RNA, 23 nt, Artificial Sequence
  Chemically synthesized
uuggccaaccgaagguaugcugg

SEQ ID NO: 72159 - RNA, 23 nt, Artificial Sequence
  Chemically synthesized
uggcuugggaaaagaucugcauu

SEQ ID NO: 72160 - RNA, 23 nt, Artificial Sequence
  Chemically synthesized
ggcuugggaaaagaucugcauuu

SEQ ID NO: 72161 - RNA, 23 nt, Artificial Sequence
  Chemically synthesized
gcuugggaaaagaucugcauuug

SEQ ID NO: 72162 - RNA, 23 nt, Artificial Sequence
  Chemically synthesized
cuugggaaaagaucugcauuuga

SEQ ID NO: 72163 - RNA, 23 nt, Artificial Sequence
  Chemically synthesized
uugggaaaagaucugcauuugaa

SEQ ID NO: 72164 - RNA, 23 nt, Artificial Sequence
  Chemically synthesized
acacgcuuauccaugacugccac

SEQ ID NO: 72165 - RNA, 23 nt, Artificial Sequence
  Chemically synthesized
cacgcuuauccaugacugccacu

SEQ ID NO: 72166 - RNA, 23 nt, Artificial Sequence
  Chemically synthesized
uagcugcagcuccuuauagaggc

SEQ ID NO: 72167 - RNA, 23 nt, Artificial Sequence
  Chemically synthesized
agcugcagcuccuuauagaggcg

SEQ ID NO: 72168 - RNA, 23 nt, Artificial Sequence
  Chemically synthesized
gcugcagcuccuuauagaggcga

SEQ ID NO: 72169 - RNA, 23 nt, Artificial Sequence
  Chemically synthesized
cugcagcuccuuauagaggcgau

SEQ ID NO: 72170 - RNA, 23 nt, Artificial Sequence
  Chemically synthesized
ugcagcuccuuauagaggcgauc

SEQ ID NO: 72171 - RNA, 23 nt, Artificial Sequence
  Chemically synthesized
uuccuuaguugccagcaauuguu

SEQ ID NO: 72172 - RNA, 23 nt, Artificial Sequence
  Chemically synthesized
uccuuaguugccagcaauuguug

SEQ ID NO: 72173 - RNA, 23 nt, Artificial Sequence
  Chemically synthesized
ccuuaguugccagcaauuguugc

SEQ ID NO: 72174 - RNA, 23 nt, Artificial Sequence
  Chemically synthesized
cuuaguugccagcaauuguugcu

SEQ ID NO: 72175 - RNA, 23 nt, Artificial Sequence
  Chemically synthesized
agcugauuucccaacugcccaau

SEQ ID NO: 72176 - RNA, 23 nt, Artificial Sequence
  Chemically synthesized
gucaugcagucuccuucuuucau

SEQ ID NO: 72177 - RNA, 23 nt, Artificial Sequence
  Chemically synthesized
ucaugcagucuccuucuuucaug

SEQ ID NO: 72178 - RNA, 23 nt, Artificial Sequence
  Chemically synthesized
uaaucccaaagcgcauaaaugac

SEQ ID NO: 72179 - RNA, 23 nt, Artificial Sequence
  Chemically synthesized
aaucccaaagcgcauaaaugacu

SEQ ID NO: 72180 - RNA, 23 nt, Artificial Sequence
  Chemically synthesized
ugggacagagauggucuccaugg

SEQ ID NO: 72181 - RNA, 23 nt, Artificial Sequence
  Chemically synthesized
gggacagagauggucuccauggc

SEQ ID NO: 72182 - RNA, 23 nt, Artificial Sequence
  Chemically synthesized
ggacagagauggucuccauggcc

SEQ ID NO: 72183 - RNA, 23 nt, Artificial Sequence
  Chemically synthesized
gacagagauggucuccauggccg

SEQ ID NO: 72184 - RNA, 23 nt, Artificial Sequence
  Chemically synthesized
acagagauggucuccauggccgc

SEQ ID NO: 72185 - RNA, 23 nt, Artificial Sequence
  Chemically synthesized
cuuuagaggccuuggugcguuag

SEQ ID NO: 72186 - RNA, 23 nt, Artificial Sequence
  Chemically synthesized
uuuagaggccuuggugcguuaga

SEQ ID NO: 72187 - RNA, 23 nt, Artificial Sequence
  Chemically synthesized
ucguaaggcuucuaggucagcau

SEQ ID NO: 72188 - RNA, 23 nt, Artificial Sequence
  Chemically synthesized
cguaaggcuucuaggucagcauc

SEQ ID NO: 72189 - RNA, 23 nt, Artificial Sequence
  Chemically synthesized
guaaggcuucuaggucagcauca

SEQ ID NO: 72190 - RNA, 23 nt, Artificial Sequence
  Chemically synthesized
uaaggcuucuaggucagcaucac

SEQ ID NO: 72191 - RNA, 23 nt, Artificial Sequence
  Chemically synthesized
gguuucgguaaggauuagauaag

SEQ ID NO: 72192 - RNA, 23 nt, Artificial Sequence
  Chemically synthesized
guuucgguaaggauuagauaaga

SEQ ID NO: 72193 - RNA, 23 nt, Artificial Sequence
  Chemically synthesized
uuucgguaaggauuagauaagaa

SEQ ID NO: 72194 - RNA, 23 nt, Artificial Sequence
  Chemically synthesized
uucgguaaggauuagauaagaaa

SEQ ID NO: 72195 - RNA, 23 nt, Artificial Sequence
  Chemically synthesized
uaagaaaggcaguaauuuaguug

SEQ ID NO: 72196 - RNA, 23 nt, Artificial Sequence
  Chemically synthesized
ugguuuuguaggaacaggaggug

SEQ ID NO: 72197 - RNA, 23 nt, Artificial Sequence
  Chemically synthesized
gguuuuguaggaacaggaggugg

SEQ ID NO: 72198 - RNA, 23 nt, Artificial Sequence
  Chemically synthesized
guuuuguaggaacaggagguggu

SEQ ID NO: 72199 - RNA, 23 nt, Artificial Sequence
  Chemically synthesized
uuuuguaggaacaggagguggua

SEQ ID NO: 72200 - RNA, 23 nt, Artificial Sequence
  Chemically synthesized
ugaaggacuccaaucagggccaa

SEQ ID NO: 72201 - RNA, 23 nt, Artificial Sequence
  Chemically synthesized
uuuagagccuuuaguuugugaag

SEQ ID NO: 72202 - RNA, 23 nt, Artificial Sequence
  Chemically synthesized
uccuucauucucuucuagagaca

SEQ ID NO: 72203 - RNA, 23 nt, Artificial Sequence
  Chemically synthesized
auguaauggaguccauccaucac

SEQ ID NO: 72204 - RNA, 23 nt, Artificial Sequence
  Chemically synthesized
uguaauggaguccauccaucacu

SEQ ID NO: 72205 - RNA, 23 nt, Artificial Sequence
  Chemically synthesized
guaauggaguccauccaucacua

SEQ ID NO: 72206 - RNA, 23 nt, Artificial Sequence
  Chemically synthesized
uaauggaguccauccaucacuau

SEQ ID NO: 72207 - RNA, 23 nt, Artificial Sequence
  Chemically synthesized
gcgcaugcucaccgagucuucuc

SEQ ID NO: 72208 - RNA, 23 nt, Artificial Sequence
  Chemically synthesized
cgcaugcucaccgagucuucucc

SEQ ID NO: 72209 - RNA, 23 nt, Artificial Sequence
  Chemically synthesized
gcaugcucaccgagucuucuccg

SEQ ID NO: 72210 - RNA, 23 nt, Artificial Sequence
  Chemically synthesized
caugcucaccgagucuucuccgg

SEQ ID NO: 72211 - RNA, 23 nt, Artificial Sequence
  Chemically synthesized
augcucaccgagucuucuccggg

SEQ ID NO: 72212 - RNA, 23 nt, Artificial Sequence
  Chemically synthesized
ucuggagauuugggcuguugucu

SEQ ID NO: 72213 - RNA, 23 nt, Artificial Sequence
  Chemically synthesized
cuggagauuugggcuguugucug

SEQ ID NO: 72214 - RNA, 23 nt, Artificial Sequence
  Chemically synthesized
uggagauuugggcuguugucugg

SEQ ID NO: 72215 - RNA, 23 nt, Artificial Sequence
  Chemically synthesized
uccucagaguaccaaaggaaggu

SEQ ID NO: 72216 - RNA, 23 nt, Artificial Sequence
  Chemically synthesized
ccucagaguaccaaaggaaggug

SEQ ID NO: 72217 - RNA, 23 nt, Artificial Sequence
  Chemically synthesized
cucagaguaccaaaggaaggugg

SEQ ID NO: 72218 - RNA, 23 nt, Artificial Sequence
  Chemically synthesized
ucagaguaccaaaggaagguggg

SEQ ID NO: 72219 - RNA, 23 nt, Artificial Sequence
  Chemically synthesized
uguuguuguagcuuggcauucug

SEQ ID NO: 72220 - RNA, 23 nt, Artificial Sequence
  Chemically synthesized
uugucaugguggcugucgauccu

SEQ ID NO: 72221 - RNA, 23 nt, Artificial Sequence
  Chemically synthesized
guccucuaauggugaauucuuca

SEQ ID NO: 72222 - RNA, 23 nt, Artificial Sequence
  Chemically synthesized
uccucuaauggugaauucuucaa

SEQ ID NO: 72223 - RNA, 23 nt, Artificial Sequence
  Chemically synthesized
ccucuaauggugaauucuucaau

SEQ ID NO: 72224 - RNA, 23 nt, Artificial Sequence
  Chemically synthesized
uuuaaacuuggauccugagaucu

SEQ ID NO: 72225 - RNA, 23 nt, Artificial Sequence
  Chemically synthesized
uuaaacuuggauccugagaucuu

SEQ ID NO: 72226 - RNA, 23 nt, Artificial Sequence
  Chemically synthesized
uaaacuuggauccugagaucuug

SEQ ID NO: 72227 - RNA, 23 nt, Artificial Sequence
  Chemically synthesized
uucugagguucauaaucccaaag

SEQ ID NO: 72228 - RNA, 23 nt, Artificial Sequence
  Chemically synthesized
ucaggaaccagagagaccaccuc

SEQ ID NO: 72229 - RNA, 23 nt, Artificial Sequence
  Chemically synthesized
auuuggcccauuaggacccucug

SEQ ID NO: 72230 - RNA, 23 nt, Artificial Sequence
  Chemically synthesized
gaucucauguugggcagugucug

SEQ ID NO: 72231 - RNA, 23 nt, Artificial Sequence
  Chemically synthesized
aucucauguugggcagugucugu

SEQ ID NO: 72232 - RNA, 23 nt, Artificial Sequence
  Chemically synthesized
ucucauguugggcagugucugua

SEQ ID NO: 72233 - RNA, 23 nt, Artificial Sequence
  Chemically synthesized
cucauguugggcagugucuguau

SEQ ID NO: 72234 - RNA, 23 nt, Artificial Sequence
  Chemically synthesized
ucauguugggcagugucuguauu

SEQ ID NO: 72235 - RNA, 23 nt, Artificial Sequence
  Chemically synthesized
cauguugggcagugucuguauuu

SEQ ID NO: 72236 - RNA, 23 nt, Artificial Sequence
  Chemically synthesized
auguugggcagugucuguauuuu

SEQ ID NO: 72237 - RNA, 23 nt, Artificial Sequence
  Chemically synthesized
uguugggcagugucuguauuuuc

SEQ ID NO: 72238 - RNA, 23 nt, Artificial Sequence
  Chemically synthesized
guugggcagugucuguauuuuca

SEQ ID NO: 72239 - RNA, 23 nt, Artificial Sequence
  Chemically synthesized
uugggcagugucuguauuuucau

SEQ ID NO: 72240 - RNA, 23 nt, Artificial Sequence
  Chemically synthesized
uaacuggaacuucugugaagugc

SEQ ID NO: 72241 - RNA, 23 nt, Artificial Sequence
  Chemically synthesized
aacuggaacuucugugaagugcu

SEQ ID NO: 72242 - RNA, 23 nt, Artificial Sequence
  Chemically synthesized
acuggaacuucugugaagugcug

SEQ ID NO: 72243 - RNA, 23 nt, Artificial Sequence
  Chemically synthesized
cuggaacuucugugaagugcugc

SEQ ID NO: 72244 - RNA, 23 nt, Artificial Sequence
  Chemically synthesized
uggaacuucugugaagugcugcu

SEQ ID NO: 72245 - RNA, 23 nt, Artificial Sequence
  Chemically synthesized
cagacugauugucaugguggcug

SEQ ID NO: 72246 - RNA, 23 nt, Artificial Sequence
  Chemically synthesized
agacugauugucaugguggcugu

SEQ ID NO: 72247 - RNA, 23 nt, Artificial Sequence
  Chemically synthesized
gacugauugucaugguggcuguc

SEQ ID NO: 72248 - RNA, 23 nt, Artificial Sequence
  Chemically synthesized
cucagcuauuucuuuuagccuuu

SEQ ID NO: 72249 - RNA, 23 nt, Artificial Sequence
  Chemically synthesized
ucagcuauuucuuuuagccuuuu

SEQ ID NO: 72250 - RNA, 23 nt, Artificial Sequence
  Chemically synthesized
aaaauucuguguggaaguuucag

SEQ ID NO: 72251 - RNA, 23 nt, Artificial Sequence
  Chemically synthesized
uucaugggcagcucaucaucauu

SEQ ID NO: 72252 - RNA, 23 nt, Artificial Sequence
  Chemically synthesized
ucaugggcagcucaucaucauuc

SEQ ID NO: 72253 - RNA, 23 nt, Artificial Sequence
  Chemically synthesized
gaaauugggagcacugaguguag

SEQ ID NO: 72254 - RNA, 23 nt, Artificial Sequence
  Chemically synthesized
aaauugggagcacugaguguagc

SEQ ID NO: 72255 - RNA, 23 nt, Artificial Sequence
  Chemically synthesized
aauugggagcacugaguguagcc

SEQ ID NO: 72256 - RNA, 23 nt, Artificial Sequence
  Chemically synthesized
auugggagcacugaguguagccu

SEQ ID NO: 72257 - RNA, 23 nt, Artificial Sequence
  Chemically synthesized
uugggagcacugaguguagccuu

SEQ ID NO: 72258 - RNA, 23 nt, Artificial Sequence
  Chemically synthesized
uccaaaucguugaagaacaucaa

SEQ ID NO: 72259 - RNA, 23 nt, Artificial Sequence
  Chemically synthesized
ccaaaucguugaagaacaucaaa

SEQ ID NO: 72260 - RNA, 23 nt, Artificial Sequence
  Chemically synthesized
cauucgcucauuauccgcaacug

SEQ ID NO: 72261 - RNA, 23 nt, Artificial Sequence
  Chemically synthesized
auucgcucauuauccgcaacugg

SEQ ID NO: 72262 - RNA, 23 nt, Artificial Sequence
  Chemically synthesized
uucgcucauuauccgcaacugga

SEQ ID NO: 72263 - RNA, 23 nt, Artificial Sequence
  Chemically synthesized
ucgcucauuauccgcaacuggac

SEQ ID NO: 72264 - RNA, 23 nt, Artificial Sequence
  Chemically synthesized
aaguuuuuuccuggcgccugcug

SEQ ID NO: 72265 - RNA, 23 nt, Artificial Sequence
  Chemically synthesized
aguuuuuuccuggcgccugcugu

SEQ ID NO: 72266 - RNA, 23 nt, Artificial Sequence
  Chemically synthesized
caccguucuccuuucuucgauau

SEQ ID NO: 72267 - RNA, 23 nt, Artificial Sequence
  Chemically synthesized
aaagaaauugggagcacugagug

SEQ ID NO: 72268 - RNA, 23 nt, Artificial Sequence
  Chemically synthesized
auccaucacuaucagcagcauuu

SEQ ID NO: 72269 - RNA, 23 nt, Artificial Sequence
  Chemically synthesized
uccaucacuaucagcagcauuua

SEQ ID NO: 72270 - RNA, 23 nt, Artificial Sequence
  Chemically synthesized
ccaucacuaucagcagcauuuac

SEQ ID NO: 72271 - RNA, 23 nt, Artificial Sequence
  Chemically synthesized
uucucuguacaaggucaaauucu

SEQ ID NO: 72272 - RNA, 23 nt, Artificial Sequence
  Chemically synthesized
uccaugagcgauacgcucugagc

SEQ ID NO: 72273 - RNA, 23 nt, Artificial Sequence
  Chemically synthesized
ccaugagcgauacgcucugagcc

SEQ ID NO: 72274 - RNA, 23 nt, Artificial Sequence
  Chemically synthesized
caugagcgauacgcucugagcca

SEQ ID NO: 72275 - RNA, 23 nt, Artificial Sequence
  Chemically synthesized
augagcgauacgcucugagccag

SEQ ID NO: 72276 - RNA, 23 nt, Artificial Sequence
  Chemically synthesized
ucuucuggguuauucuggagauu

SEQ ID NO: 72277 - RNA, 23 nt, Artificial Sequence
  Chemically synthesized
cuucuggguuauucuggagauuu

SEQ ID NO: 72278 - RNA, 23 nt, Artificial Sequence
  Chemically synthesized
uucuggguuauucuggagauuug

SEQ ID NO: 72279 - RNA, 23 nt, Artificial Sequence
  Chemically synthesized
uuucgggcuccacauguaaauau

SEQ ID NO: 72280 - RNA, 23 nt, Artificial Sequence
  Chemically synthesized
ccgcuauggugguccucugauau

SEQ ID NO: 72281 - RNA, 23 nt, Artificial Sequence
  Chemically synthesized
cgcuauggugguccucugauaua

SEQ ID NO: 72282 - RNA, 23 nt, Artificial Sequence
  Chemically synthesized
gcuauggugguccucugauauaa

SEQ ID NO: 72283 - RNA, 23 nt, Artificial Sequence
  Chemically synthesized
cuauggugguccucugauauaaa

SEQ ID NO: 72284 - RNA, 23 nt, Artificial Sequence
  Chemically synthesized
uauggugguccucugauauaaaa

SEQ ID NO: 72285 - RNA, 19 nt, Artificial Sequence
  Chemically synthesized
ucaggacccggaaugacaa

SEQ ID NO: 72286 - RNA, 19 nt, Artificial Sequence
  Chemically synthesized
gaaucugcuggacacgcua

SEQ ID NO: 72287 - RNA, 19 nt, Artificial Sequence
  Chemically synthesized
ucuucuacucgcaccugaa

SEQ ID NO: 72288 - RNA, 19 nt, Artificial Sequence
  Chemically synthesized
ccuuccucacagugacaca

SEQ ID NO: 72289 - RNA, 19 nt, Artificial Sequence
  Chemically synthesized
aguucuuugcggccuucga

SEQ ID NO: 72290 - RNA, 19 nt, Artificial Sequence
  Chemically synthesized
ccaccuucaagucucucca

SEQ ID NO: 72291 - RNA, 19 nt, Artificial Sequence
  Chemically synthesized
cuuuuaggcuggcccagau

SEQ ID NO: 72292 - RNA, 19 nt, Artificial Sequence
  Chemically synthesized
ucugguacaccaccaagaa

SEQ ID NO: 72293 - RNA, 19 nt, Artificial Sequence
  Chemically synthesized
gcugcagguggaauucuug

SEQ ID NO: 72294 - RNA, 19 nt, Artificial Sequence
  Chemically synthesized
caggagaugcuucagagga

SEQ ID NO: 72295 - RNA, 19 nt, Artificial Sequence
  Chemically synthesized
uccuuguccugcacagcaa

SEQ ID NO: 72296 - RNA, 19 nt, Artificial Sequence
  Chemically synthesized
ucuccuuggcacccuugaa

SEQ ID NO: 72297 - RNA, 19 nt, Artificial Sequence
  Chemically synthesized
acgaguuccgggaugaucu

SEQ ID NO: 72298 - RNA, 19 nt, Artificial Sequence
  Chemically synthesized
caccaagaacuguguggga

SEQ ID NO: 72299 - RNA, 19 nt, Artificial Sequence
  Chemically synthesized
ccuuggcacccuugaaucu

SEQ ID NO: 72300 - RNA, 19 nt, Artificial Sequence
  Chemically synthesized
cucacaacugccucucuga

SEQ ID NO: 72301 - RNA, 19 nt, Artificial Sequence
  Chemically synthesized
agacuuuuaggcuggccca

SEQ ID NO: 72302 - RNA, 19 nt, Artificial Sequence
  Chemically synthesized
uguucgagggcgaagaguu

SEQ ID NO: 72303 - RNA, 19 nt, Artificial Sequence
  Chemically synthesized
ugagcagauccgucacaug

SEQ ID NO: 72304 - RNA, 19 nt, Artificial Sequence
  Chemically synthesized
caccuuccucacagugaca

SEQ ID NO: 72305 - RNA, 19 nt, Artificial Sequence
  Chemically synthesized
ccuucaagucucuccagug

SEQ ID NO: 72306 - RNA, 19 nt, Artificial Sequence
  Chemically synthesized
uuuuaggcuggcccagaua

SEQ ID NO: 72307 - RNA, 19 nt, Artificial Sequence
  Chemically synthesized
ugaaucugggagaugccga

SEQ ID NO: 72308 - RNA, 19 nt, Artificial Sequence
  Chemically synthesized
uggagggcagaaucugcuu

SEQ ID NO: 72309 - RNA, 19 nt, Artificial Sequence
  Chemically synthesized
acuuuuaggcuggcccaga

SEQ ID NO: 72310 - RNA, 19 nt, Artificial Sequence
  Chemically synthesized
cgucacaugcucuucuccu

SEQ ID NO: 72311 - RNA, 19 nt, Artificial Sequence
  Chemically synthesized
caucaagcugccgagacuu

SEQ ID NO: 72312 - RNA, 19 nt, Artificial Sequence
  Chemically synthesized
gagggcgaagaguucuuug

SEQ ID NO: 72313 - RNA, 19 nt, Artificial Sequence
  Chemically synthesized
uccugaccucagauuugga

SEQ ID NO: 72314 - RNA, 19 nt, Artificial Sequence
  Chemically synthesized
cucauuccagaaaugccca

SEQ ID NO: 72315 - RNA, 19 nt, Artificial Sequence
  Chemically synthesized
ccucacagugacacacaac

SEQ ID NO: 72316 - RNA, 19 nt, Artificial Sequence
  Chemically synthesized
caaguaccaggacagcauc

SEQ ID NO: 72317 - RNA, 19 nt, Artificial Sequence
  Chemically synthesized
uacuggcucugguacacca

SEQ ID NO: 72318 - RNA, 19 nt, Artificial Sequence
  Chemically synthesized
acuucuccugguuccuugu

SEQ ID NO: 72319 - RNA, 19 nt, Artificial Sequence
  Chemically synthesized
augcuucagaggauucgga

SEQ ID NO: 72320 - RNA, 19 nt, Artificial Sequence
  Chemically synthesized
ucuugcgucugagcacuca

SEQ ID NO: 72321 - RNA, 19 nt, Artificial Sequence
  Chemically synthesized
cagacuguuccugaccuca

SEQ ID NO: 72322 - RNA, 19 nt, Artificial Sequence
  Chemically synthesized
uguguggagggcagaaucu

SEQ ID NO: 72323 - RNA, 19 nt, Artificial Sequence
  Chemically synthesized
ucuggaugagcagauccgu

SEQ ID NO: 72324 - RNA, 19 nt, Artificial Sequence
  Chemically synthesized
acaucacagcucagguggu

SEQ ID NO: 72325 - RNA, 19 nt, Artificial Sequence
  Chemically synthesized
gucucacaacugccucucu

SEQ ID NO: 72326 - RNA, 19 nt, Artificial Sequence
  Chemically synthesized
caccuucaagucucuccag

SEQ ID NO: 72327 - RNA, 19 nt, Artificial Sequence
  Chemically synthesized
gaugaucuggaugagcaga

SEQ ID NO: 72328 - RNA, 19 nt, Artificial Sequence
  Chemically synthesized
gaauucuugcgucugagca

SEQ ID NO: 72329 - RNA, 19 nt, Artificial Sequence
  Chemically synthesized
ggaauucuugcgucugagc

SEQ ID NO: 72330 - RNA, 19 nt, Artificial Sequence
  Chemically synthesized
gguacaccaccaagaacug

SEQ ID NO: 72331 - RNA, 19 nt, Artificial Sequence
  Chemically synthesized
cugggaugacaucacagcu

SEQ ID NO: 72332 - RNA, 19 nt, Artificial Sequence
  Chemically synthesized
acccggaaugacaacagcu

SEQ ID NO: 72333 - RNA, 19 nt, Artificial Sequence
  Chemically synthesized
uucagaggauucggacgca

SEQ ID NO: 72334 - RNA, 19 nt, Artificial Sequence
  Chemically synthesized
uggaugagcagauccguca

SEQ ID NO: 72335 - RNA, 19 nt, Artificial Sequence
  Chemically synthesized
augacaucacagcucaggu

SEQ ID NO: 72336 - RNA, 19 nt, Artificial Sequence
  Chemically synthesized
aguuccgggaugaucugga

SEQ ID NO: 72337 - RNA, 19 nt, Artificial Sequence
  Chemically synthesized
cuuucugacgcagagcaac

SEQ ID NO: 72338 - RNA, 19 nt, Artificial Sequence
  Chemically synthesized
uucuacucgcaccugaaga

SEQ ID NO: 72339 - RNA, 19 nt, Artificial Sequence
  Chemically synthesized
cugucucacaacugccucu

SEQ ID NO: 72340 - RNA, 19 nt, Artificial Sequence
  Chemically synthesized
cugaccucagauuuggaca

SEQ ID NO: 72341 - RNA, 19 nt, Artificial Sequence
  Chemically synthesized
uguuccugaccucagauuu

SEQ ID NO: 72342 - RNA, 19 nt, Artificial Sequence
  Chemically synthesized
accuucaagucucuccagu

SEQ ID NO: 72343 - RNA, 19 nt, Artificial Sequence
  Chemically synthesized
cuuugucuucuacucgcac

SEQ ID NO: 72344 - RNA, 19 nt, Artificial Sequence
  Chemically synthesized
aggacccggaaugacaaca

SEQ ID NO: 72345 - RNA, 19 nt, Artificial Sequence
  Chemically synthesized
gaugcuucagaggauucgg

SEQ ID NO: 72346 - RNA, 19 nt, Artificial Sequence
  Chemically synthesized
uuuaggcuggcccagauau

SEQ ID NO: 72347 - RNA, 19 nt, Artificial Sequence
  Chemically synthesized
cagauccgucacaugcucu

SEQ ID NO: 72348 - RNA, 19 nt, Artificial Sequence
  Chemically synthesized
cuucaacagccuggagaca

SEQ ID NO: 72349 - RNA, 19 nt, Artificial Sequence
  Chemically synthesized
agcagauccgucacaugcu

SEQ ID NO: 72350 - RNA, 19 nt, Artificial Sequence
  Chemically synthesized
cauuccagaaaugcccaga

SEQ ID NO: 72351 - RNA, 19 nt, Artificial Sequence
  Chemically synthesized
ucaccuuccucacagugac

SEQ ID NO: 72352 - RNA, 19 nt, Artificial Sequence
  Chemically synthesized
gcucuugcugucucacaac

SEQ ID NO: 72353 - RNA, 19 nt, Artificial Sequence
  Chemically synthesized
agcuucaacagccuggaga

SEQ ID NO: 72354 - RNA, 19 nt, Artificial Sequence
  Chemically synthesized
agauuuggacagcuuuccu

SEQ ID NO: 72355 - RNA, 19 nt, Artificial Sequence
  Chemically synthesized
guuccugaccucagauuug

SEQ ID NO: 72356 - RNA, 19 nt, Artificial Sequence
  Chemically synthesized
ccucauuccagaaaugccc

SEQ ID NO: 72357 - RNA, 19 nt, Artificial Sequence
  Chemically synthesized
ugcuucagaggauucggac

SEQ ID NO: 72358 - RNA, 19 nt, Artificial Sequence
  Chemically synthesized
cucaccuuccucacaguga

SEQ ID NO: 72359 - RNA, 19 nt, Artificial Sequence
  Chemically synthesized
cuugcugucucacaacugc

SEQ ID NO: 72360 - RNA, 19 nt, Artificial Sequence
  Chemically synthesized
uuaggcuggcccagauauu

SEQ ID NO: 72361 - RNA, 19 nt, Artificial Sequence
  Chemically synthesized
ucuccugguuccuuguggu

SEQ ID NO: 72362 - RNA, 19 nt, Artificial Sequence
  Chemically synthesized
auuuggacagcuuuccugu

SEQ ID NO: 72363 - RNA, 19 nt, Artificial Sequence
  Chemically synthesized
aaaugcccagacuguuccu

SEQ ID NO: 72364 - RNA, 19 nt, Artificial Sequence
  Chemically synthesized
uuccucacagugacacaca

SEQ ID NO: 72365 - RNA, 19 nt, Artificial Sequence
  Chemically synthesized
ccuugaaucugggagaugc

SEQ ID NO: 72366 - RNA, 19 nt, Artificial Sequence
  Chemically synthesized
cugaagaaugugaaggagg

SEQ ID NO: 72367 - RNA, 19 nt, Artificial Sequence
  Chemically synthesized
gguggaauucuugcgucug

SEQ ID NO: 72368 - RNA, 19 nt, Artificial Sequence
  Chemically synthesized
uuggacagcuuuccuguga

SEQ ID NO: 72369 - RNA, 19 nt, Artificial Sequence
  Chemically synthesized
gauuuggacagcuuuccug

SEQ ID NO: 72370 - RNA, 19 nt, Artificial Sequence
  Chemically synthesized
ucagauuuggacagcuuuc

SEQ ID NO: 72371 - RNA, 19 nt, Artificial Sequence
  Chemically synthesized
acuguuccugaccucagau

SEQ ID NO: 72372 - RNA, 19 nt, Artificial Sequence
  Chemically synthesized
augcccagacuguuccuga

SEQ ID NO: 72373 - RNA, 19 nt, Artificial Sequence
  Chemically synthesized
cuaccuccugagauuggag

SEQ ID NO: 72374 - RNA, 19 nt, Artificial Sequence
  Chemically synthesized
ucucagaaucugcuggaca

SEQ ID NO: 72375 - RNA, 19 nt, Artificial Sequence
  Chemically synthesized
cagaaucugcuuugucuuc

SEQ ID NO: 72376 - RNA, 19 nt, Artificial Sequence
  Chemically synthesized
cugguacaccaccaagaac

SEQ ID NO: 72377 - RNA, 19 nt, Artificial Sequence
  Chemically synthesized
cccacagacuuuuaggcug

SEQ ID NO: 72378 - RNA, 19 nt, Artificial Sequence
  Chemically synthesized
augagcagauccgucacau

SEQ ID NO: 72379 - RNA, 19 nt, Artificial Sequence
  Chemically synthesized
cuucuacucgcaccugaag

SEQ ID NO: 72380 - RNA, 19 nt, Artificial Sequence
  Chemically synthesized
aucugcuuugucuucuacu

SEQ ID NO: 72381 - RNA, 19 nt, Artificial Sequence
  Chemically synthesized
agacuguuccugaccucag

SEQ ID NO: 72382 - RNA, 19 nt, Artificial Sequence
  Chemically synthesized
cccucauuccagaaaugcc

SEQ ID NO: 72383 - RNA, 19 nt, Artificial Sequence
  Chemically synthesized
aucucucucagaaucugcu

SEQ ID NO: 72384 - RNA, 19 nt, Artificial Sequence
  Chemically synthesized
accugggaugacaucacag

SEQ ID NO: 72385 - RNA, 19 nt, Artificial Sequence
  Chemically synthesized
cugcugcagguggaauucu

SEQ ID NO: 72386 - RNA, 19 nt, Artificial Sequence
  Chemically synthesized
cucacagugacacacaacc

SEQ ID NO: 72387 - RNA, 19 nt, Artificial Sequence
  Chemically synthesized
ucucacaacugccucucug

SEQ ID NO: 72388 - RNA, 19 nt, Artificial Sequence
  Chemically synthesized
ucugcuuugucuucuacuc

SEQ ID NO: 72389 - RNA, 19 nt, Artificial Sequence
  Chemically synthesized
caagucucuccagugugug

SEQ ID NO: 72390 - RNA, 19 nt, Artificial Sequence
  Chemically synthesized
ccacagacuuuuaggcugg

SEQ ID NO: 72391 - RNA, 19 nt, Artificial Sequence
  Chemically synthesized
aaucugggagaugccgaga

SEQ ID NO: 72392 - RNA, 19 nt, Artificial Sequence
  Chemically synthesized
ucucucagaaucugcugga

SEQ ID NO: 72393 - RNA, 19 nt, Artificial Sequence
  Chemically synthesized
cuuccucacagugacacac

SEQ ID NO: 72394 - RNA, 19 nt, Artificial Sequence
  Chemically synthesized
ugcugucucacaacugccu

SEQ ID NO: 72395 - RNA, 19 nt, Artificial Sequence
  Chemically synthesized
uugucuucuacucgcaccu

SEQ ID NO: 72396 - RNA, 19 nt, Artificial Sequence
  Chemically synthesized
uccuuggcacccuugaauc

SEQ ID NO: 72397 - RNA, 19 nt, Artificial Sequence
  Chemically synthesized
aauucuugcgucugagcac

SEQ ID NO: 72398 - RNA, 19 nt, Artificial Sequence
  Chemically synthesized
uacucgcaccugaagaaug

SEQ ID NO: 72399 - RNA, 19 nt, Artificial Sequence
  Chemically synthesized
cacagacuuuuaggcuggc

SEQ ID NO: 72400 - RNA, 19 nt, Artificial Sequence
  Chemically synthesized
gauccgucacaugcucuuc

SEQ ID NO: 72401 - RNA, 19 nt, Artificial Sequence
  Chemically synthesized
cuugaaucugggagaugcc

SEQ ID NO: 72402 - RNA, 19 nt, Artificial Sequence
  Chemically synthesized
ugugaaccucaucgcucug

SEQ ID NO: 72403 - RNA, 19 nt, Artificial Sequence
  Chemically synthesized
ucacaacugccucucugag

SEQ ID NO: 72404 - RNA, 19 nt, Artificial Sequence
  Chemically synthesized
agaugcuucagaggauucg

SEQ ID NO: 72405 - RNA, 19 nt, Artificial Sequence
  Chemically synthesized
auccgucacaugcucuucu

SEQ ID NO: 72406 - RNA, 19 nt, Artificial Sequence
  Chemically synthesized
auucuugcgucugagcacu

SEQ ID NO: 72407 - RNA, 19 nt, Artificial Sequence
  Chemically synthesized
cugcuuugucuucuacucg

SEQ ID NO: 72408 - RNA, 19 nt, Artificial Sequence
  Chemically synthesized
auguucgagggcgaagagu

SEQ ID NO: 72409 - RNA, 19 nt, Artificial Sequence
  Chemically synthesized
gaaaugcccagacuguucc

SEQ ID NO: 72410 - RNA, 19 nt, Artificial Sequence
  Chemically synthesized
ucugacacgguggagaugu

SEQ ID NO: 72411 - RNA, 19 nt, Artificial Sequence
  Chemically synthesized
ucuugcugucucacaacug

SEQ ID NO: 72412 - RNA, 19 nt, Artificial Sequence
  Chemically synthesized
ucacaugcucuucuccugg

SEQ ID NO: 72413 - RNA, 19 nt, Artificial Sequence
  Chemically synthesized
gaugacaucacagcucagg

SEQ ID NO: 72414 - RNA, 19 nt, Artificial Sequence
  Chemically synthesized
uccugguuccuugugguuu

SEQ ID NO: 72415 - RNA, 19 nt, Artificial Sequence
  Chemically synthesized
cuuggcacccuugaaucug

SEQ ID NO: 72416 - RNA, 19 nt, Artificial Sequence
  Chemically synthesized
uuccagaaaugcccagacu

SEQ ID NO: 72417 - RNA, 19 nt, Artificial Sequence
  Chemically synthesized
uccagaaaugcccagacug

SEQ ID NO: 72418 - RNA, 19 nt, Artificial Sequence
  Chemically synthesized
aaucugcuggacacgcuac

SEQ ID NO: 72419 - RNA, 19 nt, Artificial Sequence
  Chemically synthesized
cugcagguggaauucuugc

SEQ ID NO: 72420 - RNA, 19 nt, Artificial Sequence
  Chemically synthesized
gaucucucucagaaucugc

SEQ ID NO: 72421 - RNA, 19 nt, Artificial Sequence
  Chemically synthesized
uggaccugagcuucaacag

SEQ ID NO: 72422 - RNA, 19 nt, Artificial Sequence
  Chemically synthesized
ugcuuugucuucuacucgc

SEQ ID NO: 72423 - RNA, 19 nt, Artificial Sequence
  Chemically synthesized
uuuggacagcuuuccugug

SEQ ID NO: 72424 - RNA, 19 nt, Artificial Sequence
  Chemically synthesized
uuggcacccuugaaucugg

SEQ ID NO: 72425 - RNA, 19 nt, Artificial Sequence
  Chemically synthesized
gaccucagauuuggacagc

SEQ ID NO: 72426 - RNA, 19 nt, Artificial Sequence
  Chemically synthesized
ucgaucucucucagaaucu

SEQ ID NO: 72427 - RNA, 19 nt, Artificial Sequence
  Chemically synthesized
aagucucuccagugugugg

SEQ ID NO: 72428 - RNA, 19 nt, Artificial Sequence
  Chemically synthesized
cucgcaccugaagaaugug

SEQ ID NO: 72429 - RNA, 19 nt, Artificial Sequence
  Chemically synthesized
agggcgaagaguucuuugc

SEQ ID NO: 72430 - RNA, 19 nt, Artificial Sequence
  Chemically synthesized
acgcuaccuccugagauug

SEQ ID NO: 72431 - RNA, 19 nt, Artificial Sequence
  Chemically synthesized
caccaccaagaacugugug

SEQ ID NO: 72432 - RNA, 19 nt, Artificial Sequence
  Chemically synthesized
ucauuccagaaaugcccag

SEQ ID NO: 72433 - RNA, 19 nt, Artificial Sequence
  Chemically synthesized
uaggcuggcccagauauuc

SEQ ID NO: 72434 - RNA, 19 nt, Artificial Sequence
  Chemically synthesized
ucacagugacacacaaccg

SEQ ID NO: 72435 - RNA, 19 nt, Artificial Sequence
  Chemically synthesized
ugucuucuacucgcaccug

SEQ ID NO: 72436 - RNA, 19 nt, Artificial Sequence
  Chemically synthesized
accaagaacugugugggag

SEQ ID NO: 72437 - RNA, 19 nt, Artificial Sequence
  Chemically synthesized
gaucuggaugagcagaucc

SEQ ID NO: 72438 - RNA, 19 nt, Artificial Sequence
  Chemically synthesized
uucaagucucuccagugug

SEQ ID NO: 72439 - RNA, 19 nt, Artificial Sequence
  Chemically synthesized
cuucuccugguuccuugug

SEQ ID NO: 72440 - RNA, 19 nt, Artificial Sequence
  Chemically synthesized
cagauuuggacagcuuucc

SEQ ID NO: 72441 - RNA, 19 nt, Artificial Sequence
  Chemically synthesized
auuccagaaaugcccagac

SEQ ID NO: 72442 - RNA, 19 nt, Artificial Sequence
  Chemically synthesized
uuguccugcacagcaaccu

SEQ ID NO: 72443 - RNA, 19 nt, Artificial Sequence
  Chemically synthesized
ucagaaucugcuggacacg

SEQ ID NO: 72444 - RNA, 19 nt, Artificial Sequence
  Chemically synthesized
uucugacgcagagcaaccu

SEQ ID NO: 72445 - RNA, 19 nt, Artificial Sequence
  Chemically synthesized
ugacacgguggagauguuc

SEQ ID NO: 72446 - RNA, 19 nt, Artificial Sequence
  Chemically synthesized
aucaagcugccgagacuuc

SEQ ID NO: 72447 - RNA, 19 nt, Artificial Sequence
  Chemically synthesized
uuucugacgcagagcaacc

SEQ ID NO: 72448 - RNA, 19 nt, Artificial Sequence
  Chemically synthesized
uuccugaccucagauuugg

SEQ ID NO: 72449 - RNA, 19 nt, Artificial Sequence
  Chemically synthesized
uugcugucucacaacugcc

SEQ ID NO: 72450 - RNA, 19 nt, Artificial Sequence
  Chemically synthesized
uucgagggcgaagaguucu

SEQ ID NO: 72451 - RNA, 19 nt, Artificial Sequence
  Chemically synthesized
cugguuccuugugguuucc

SEQ ID NO: 72452 - RNA, 19 nt, Artificial Sequence
  Chemically synthesized
ugcagguggaauucuugcg

SEQ ID NO: 72453 - RNA, 19 nt, Artificial Sequence
  Chemically synthesized
ucucucucagaaucugcug

SEQ ID NO: 72454 - RNA, 19 nt, Artificial Sequence
  Chemically synthesized
uuugucuucuacucgcacc

SEQ ID NO: 72455 - RNA, 19 nt, Artificial Sequence
  Chemically synthesized
gcccucauuccagaaaugc

SEQ ID NO: 72456 - RNA, 19 nt, Artificial Sequence
  Chemically synthesized
cucucucagaaucugcugg

SEQ ID NO: 72457 - RNA, 19 nt, Artificial Sequence
  Chemically synthesized
accuuccucacagugacac

SEQ ID NO: 72458 - RNA, 19 nt, Artificial Sequence
  Chemically synthesized
aucuggaugagcagauccg

SEQ ID NO: 72459 - RNA, 19 nt, Artificial Sequence
  Chemically synthesized
caccugaagaaugugaagg

SEQ ID NO: 72460 - RNA, 19 nt, Artificial Sequence
  Chemically synthesized
uucuugcgucugagcacuc

SEQ ID NO: 72461 - RNA, 19 nt, Artificial Sequence
  Chemically synthesized
aaguaccaggacagcaucc

SEQ ID NO: 72462 - RNA, 19 nt, Artificial Sequence
  Chemically synthesized
uuccgggaugaucuggaug

SEQ ID NO: 72463 - RNA, 19 nt, Artificial Sequence
  Chemically synthesized
accaccaagaacugugugg

SEQ ID NO: 72464 - RNA, 19 nt, Artificial Sequence
  Chemically synthesized
uucaacagccuggagacac

SEQ ID NO: 72465 - RNA, 19 nt, Artificial Sequence
  Chemically synthesized
uucuccugguuccuugugg

SEQ ID NO: 72466 - RNA, 19 nt, Artificial Sequence
  Chemically synthesized
uaccuccugagauuggagg

SEQ ID NO: 72467 - RNA, 19 nt, Artificial Sequence
  Chemically synthesized
uugaaucugggagaugccg

SEQ ID NO: 72468 - RNA, 19 nt, Artificial Sequence
  Chemically synthesized
uacaccaccaagaacugug

SEQ ID NO: 72469 - RNA, 19 nt, Artificial Sequence
  Chemically synthesized
acagacuuuuaggcuggcc

SEQ ID NO: 72470 - RNA, 19 nt, Artificial Sequence
  Chemically synthesized
ugucucacaacugccucuc

SEQ ID NO: 72471 - RNA, 19 nt, Artificial Sequence
  Chemically synthesized
aaugcccagacuguuccug

SEQ ID NO: 72472 - RNA, 19 nt, Artificial Sequence
  Chemically synthesized
ugguuccuugugguuuccc

SEQ ID NO: 72473 - RNA, 19 nt, Artificial Sequence
  Chemically synthesized
uugucauuccggguccuga

SEQ ID NO: 72474 - RNA, 19 nt, Artificial Sequence
  Chemically synthesized
uagcguguccagcagauuc

SEQ ID NO: 72475 - RNA, 19 nt, Artificial Sequence
  Chemically synthesized
uucaggugcgaguagaaga

SEQ ID NO: 72476 - RNA, 19 nt, Artificial Sequence
  Chemically synthesized
ugugucacugugaggaagg

SEQ ID NO: 72477 - RNA, 19 nt, Artificial Sequence
  Chemically synthesized
ucgaaggccgcaaagaacu

SEQ ID NO: 72478 - RNA, 19 nt, Artificial Sequence
  Chemically synthesized
uggagagacuugaaggugg

SEQ ID NO: 72479 - RNA, 19 nt, Artificial Sequence
  Chemically synthesized
aucugggccagccuaaaag

SEQ ID NO: 72480 - RNA, 19 nt, Artificial Sequence
  Chemically synthesized
uucuuggugguguaccaga

SEQ ID NO: 72481 - RNA, 19 nt, Artificial Sequence
  Chemically synthesized
caagaauuccaccugcagc

SEQ ID NO: 72482 - RNA, 19 nt, Artificial Sequence
  Chemically synthesized
uccucugaagcaucuccug

SEQ ID NO: 72483 - RNA, 19 nt, Artificial Sequence
  Chemically synthesized
uugcugugcaggacaagga

SEQ ID NO: 72484 - RNA, 19 nt, Artificial Sequence
  Chemically synthesized
uucaagggugccaaggaga

SEQ ID NO: 72485 - RNA, 19 nt, Artificial Sequence
  Chemically synthesized
agaucaucccggaacucgu

SEQ ID NO: 72486 - RNA, 19 nt, Artificial Sequence
  Chemically synthesized
ucccacacaguucuuggug

SEQ ID NO: 72487 - RNA, 19 nt, Artificial Sequence
  Chemically synthesized
agauucaagggugccaagg

SEQ ID NO: 72488 - RNA, 19 nt, Artificial Sequence
  Chemically synthesized
ucagagaggcaguugugag

SEQ ID NO: 72489 - RNA, 19 nt, Artificial Sequence
  Chemically synthesized
ugggccagccuaaaagucu

SEQ ID NO: 72490 - RNA, 19 nt, Artificial Sequence
  Chemically synthesized
aacucuucgcccucgaaca

SEQ ID NO: 72491 - RNA, 19 nt, Artificial Sequence
  Chemically synthesized
caugugacggaucugcuca

SEQ ID NO: 72492 - RNA, 19 nt, Artificial Sequence
  Chemically synthesized
ugucacugugaggaaggug

SEQ ID NO: 72493 - RNA, 19 nt, Artificial Sequence
  Chemically synthesized
cacuggagagacuugaagg

SEQ ID NO: 72494 - RNA, 19 nt, Artificial Sequence
  Chemically synthesized
uaucugggccagccuaaaa

SEQ ID NO: 72495 - RNA, 19 nt, Artificial Sequence
  Chemically synthesized
ucggcaucucccagauuca

SEQ ID NO: 72496 - RNA, 19 nt, Artificial Sequence
  Chemically synthesized
aagcagauucugcccucca

SEQ ID NO: 72497 - RNA, 19 nt, Artificial Sequence
  Chemically synthesized
ucugggccagccuaaaagu

SEQ ID NO: 72498 - RNA, 19 nt, Artificial Sequence
  Chemically synthesized
aggagaagagcaugugacg

SEQ ID NO: 72499 - RNA, 19 nt, Artificial Sequence
  Chemically synthesized
aagucucggcagcuugaug

SEQ ID NO: 72500 - RNA, 19 nt, Artificial Sequence
  Chemically synthesized
caaagaacucuucgcccuc

SEQ ID NO: 72501 - RNA, 19 nt, Artificial Sequence
  Chemically synthesized
uccaaaucugaggucagga

SEQ ID NO: 72502 - RNA, 19 nt, Artificial Sequence
  Chemically synthesized
ugggcauuucuggaaugag

SEQ ID NO: 72503 - RNA, 19 nt, Artificial Sequence
  Chemically synthesized
guugugugucacugugagg

SEQ ID NO: 72504 - RNA, 19 nt, Artificial Sequence
  Chemically synthesized
gaugcuguccugguacuug

SEQ ID NO: 72505 - RNA, 19 nt, Artificial Sequence
  Chemically synthesized
ugguguaccagagccagua

SEQ ID NO: 72506 - RNA, 19 nt, Artificial Sequence
  Chemically synthesized
acaaggaaccaggagaagu

SEQ ID NO: 72507 - RNA, 19 nt, Artificial Sequence
  Chemically synthesized
uccgaauccucugaagcau

SEQ ID NO: 72508 - RNA, 19 nt, Artificial Sequence
  Chemically synthesized
ugagugcucagacgcaaga

SEQ ID NO: 72509 - RNA, 19 nt, Artificial Sequence
  Chemically synthesized
ugaggucaggaacagucug

SEQ ID NO: 72510 - RNA, 19 nt, Artificial Sequence
  Chemically synthesized
agauucugcccuccacaca

SEQ ID NO: 72511 - RNA, 19 nt, Artificial Sequence
  Chemically synthesized
acggaucugcucauccaga

SEQ ID NO: 72512 - RNA, 19 nt, Artificial Sequence
  Chemically synthesized
accaccugagcugugaugu

SEQ ID NO: 72513 - RNA, 19 nt, Artificial Sequence
  Chemically synthesized
agagaggcaguugugagac

SEQ ID NO: 72514 - RNA, 19 nt, Artificial Sequence
  Chemically synthesized
cuggagagacuugaaggug

SEQ ID NO: 72515 - RNA, 19 nt, Artificial Sequence
  Chemically synthesized
ucugcucauccagaucauc

SEQ ID NO: 72516 - RNA, 19 nt, Artificial Sequence
  Chemically synthesized
ugcucagacgcaagaauuc

SEQ ID NO: 72517 - RNA, 19 nt, Artificial Sequence
  Chemically synthesized
gcucagacgcaagaauucc

SEQ ID NO: 72518 - RNA, 19 nt, Artificial Sequence
  Chemically synthesized
caguucuuggugguguacc

SEQ ID NO: 72519 - RNA, 19 nt, Artificial Sequence
  Chemically synthesized
agcugugaugucaucccag

SEQ ID NO: 72520 - RNA, 19 nt, Artificial Sequence
  Chemically synthesized
agcuguugucauuccgggu

SEQ ID NO: 72521 - RNA, 19 nt, Artificial Sequence
  Chemically synthesized
ugcguccgaauccucugaa

SEQ ID NO: 72522 - RNA, 19 nt, Artificial Sequence
  Chemically synthesized
ugacggaucugcucaucca

SEQ ID NO: 72523 - RNA, 19 nt, Artificial Sequence
  Chemically synthesized
accugagcugugaugucau

SEQ ID NO: 72524 - RNA, 19 nt, Artificial Sequence
  Chemically synthesized
uccagaucaucccggaacu

SEQ ID NO: 72525 - RNA, 19 nt, Artificial Sequence
  Chemically synthesized
guugcucugcgucagaaag

SEQ ID NO: 72526 - RNA, 19 nt, Artificial Sequence
  Chemically synthesized
ucuucaggugcgaguagaa

SEQ ID NO: 72527 - RNA, 19 nt, Artificial Sequence
  Chemically synthesized
agaggcaguugugagacag

SEQ ID NO: 72528 - RNA, 19 nt, Artificial Sequence
  Chemically synthesized
uguccaaaucugaggucag

SEQ ID NO: 72529 - RNA, 19 nt, Artificial Sequence
  Chemically synthesized
aaaucugaggucaggaaca

SEQ ID NO: 72530 - RNA, 19 nt, Artificial Sequence
  Chemically synthesized
acuggagagacuugaaggu

SEQ ID NO: 72531 - RNA, 19 nt, Artificial Sequence
  Chemically synthesized
gugcgaguagaagacaaag

SEQ ID NO: 72532 - RNA, 19 nt, Artificial Sequence
  Chemically synthesized
uguugucauuccggguccu

SEQ ID NO: 72533 - RNA, 19 nt, Artificial Sequence
  Chemically synthesized
ccgaauccucugaagcauc

SEQ ID NO: 72534 - RNA, 19 nt, Artificial Sequence
  Chemically synthesized
auaucugggccagccuaaa

SEQ ID NO: 72535 - RNA, 19 nt, Artificial Sequence
  Chemically synthesized
agagcaugugacggaucug

SEQ ID NO: 72536 - RNA, 19 nt, Artificial Sequence
  Chemically synthesized
ugucuccaggcuguugaag

SEQ ID NO: 72537 - RNA, 19 nt, Artificial Sequence
  Chemically synthesized
agcaugugacggaucugcu

SEQ ID NO: 72538 - RNA, 19 nt, Artificial Sequence
  Chemically synthesized
ucugggcauuucuggaaug

SEQ ID NO: 72539 - RNA, 19 nt, Artificial Sequence
  Chemically synthesized
gucacugugaggaagguga

SEQ ID NO: 72540 - RNA, 19 nt, Artificial Sequence
  Chemically synthesized
guugugagacagcaagagc

SEQ ID NO: 72541 - RNA, 19 nt, Artificial Sequence
  Chemically synthesized
ucuccaggcuguugaagcu

SEQ ID NO: 72542 - RNA, 19 nt, Artificial Sequence
  Chemically synthesized
aggaaagcuguccaaaucu

SEQ ID NO: 72543 - RNA, 19 nt, Artificial Sequence
  Chemically synthesized
caaaucugaggucaggaac

SEQ ID NO: 72544 - RNA, 19 nt, Artificial Sequence
  Chemically synthesized
gggcauuucuggaaugagg

SEQ ID NO: 72545 - RNA, 19 nt, Artificial Sequence
  Chemically synthesized
guccgaauccucugaagca

SEQ ID NO: 72546 - RNA, 19 nt, Artificial Sequence
  Chemically synthesized
ucacugugaggaaggugag

SEQ ID NO: 72547 - RNA, 19 nt, Artificial Sequence
  Chemically synthesized
gcaguugugagacagcaag

SEQ ID NO: 72548 - RNA, 19 nt, Artificial Sequence
  Chemically synthesized
aauaucugggccagccuaa

SEQ ID NO: 72549 - RNA, 19 nt, Artificial Sequence
  Chemically synthesized
accacaaggaaccaggaga

SEQ ID NO: 72550 - RNA, 19 nt, Artificial Sequence
  Chemically synthesized
acaggaaagcuguccaaau

SEQ ID NO: 72551 - RNA, 19 nt, Artificial Sequence
  Chemically synthesized
aggaacagucugggcauuu

SEQ ID NO: 72552 - RNA, 19 nt, Artificial Sequence
  Chemically synthesized
ugugugucacugugaggaa

SEQ ID NO: 72553 - RNA, 19 nt, Artificial Sequence
  Chemically synthesized
gcaucucccagauucaagg

SEQ ID NO: 72554 - RNA, 19 nt, Artificial Sequence
  Chemically synthesized
ccuccuucacauucuucag

SEQ ID NO: 72555 - RNA, 19 nt, Artificial Sequence
  Chemically synthesized
cagacgcaagaauuccacc

SEQ ID NO: 72556 - RNA, 19 nt, Artificial Sequence
  Chemically synthesized
ucacaggaaagcuguccaa

SEQ ID NO: 72557 - RNA, 19 nt, Artificial Sequence
  Chemically synthesized
caggaaagcuguccaaauc

SEQ ID NO: 72558 - RNA, 19 nt, Artificial Sequence
  Chemically synthesized
gaaagcuguccaaaucuga

SEQ ID NO: 72559 - RNA, 19 nt, Artificial Sequence
  Chemically synthesized
aucugaggucaggaacagu

SEQ ID NO: 72560 - RNA, 19 nt, Artificial Sequence
  Chemically synthesized
ucaggaacagucugggcau

SEQ ID NO: 72561 - RNA, 19 nt, Artificial Sequence
  Chemically synthesized
cuccaaucucaggagguag

SEQ ID NO: 72562 - RNA, 19 nt, Artificial Sequence
  Chemically synthesized
uguccagcagauucugaga

SEQ ID NO: 72563 - RNA, 19 nt, Artificial Sequence
  Chemically synthesized
gaagacaaagcagauucug

SEQ ID NO: 72564 - RNA, 19 nt, Artificial Sequence
  Chemically synthesized
guucuuggugguguaccag

SEQ ID NO: 72565 - RNA, 19 nt, Artificial Sequence
  Chemically synthesized
cagccuaaaagucuguggg

SEQ ID NO: 72566 - RNA, 19 nt, Artificial Sequence
  Chemically synthesized
augugacggaucugcucau

SEQ ID NO: 72567 - RNA, 19 nt, Artificial Sequence
  Chemically synthesized
cuucaggugcgaguagaag

SEQ ID NO: 72568 - RNA, 19 nt, Artificial Sequence
  Chemically synthesized
aguagaagacaaagcagau

SEQ ID NO: 72569 - RNA, 19 nt, Artificial Sequence
  Chemically synthesized
cugaggucaggaacagucu

SEQ ID NO: 72570 - RNA, 19 nt, Artificial Sequence
  Chemically synthesized
ggcauuucuggaaugaggg

SEQ ID NO: 72571 - RNA, 19 nt, Artificial Sequence
  Chemically synthesized
agcagauucugagagagau

SEQ ID NO: 72572 - RNA, 19 nt, Artificial Sequence
  Chemically synthesized
cugugaugucaucccaggu

SEQ ID NO: 72573 - RNA, 19 nt, Artificial Sequence
  Chemically synthesized
agaauuccaccugcagcag

SEQ ID NO: 72574 - RNA, 19 nt, Artificial Sequence
  Chemically synthesized
gguugugugucacugugag

SEQ ID NO: 72575 - RNA, 19 nt, Artificial Sequence
  Chemically synthesized
cagagaggcaguugugaga

SEQ ID NO: 72576 - RNA, 19 nt, Artificial Sequence
  Chemically synthesized
gaguagaagacaaagcaga

SEQ ID NO: 72577 - RNA, 19 nt, Artificial Sequence
  Chemically synthesized
cacacacuggagagacuug

SEQ ID NO: 72578 - RNA, 19 nt, Artificial Sequence
  Chemically synthesized
ccagccuaaaagucugugg

SEQ ID NO: 72579 - RNA, 19 nt, Artificial Sequence
  Chemically synthesized
ucucggcaucucccagauu

SEQ ID NO: 72580 - RNA, 19 nt, Artificial Sequence
  Chemically synthesized
uccagcagauucugagaga

SEQ ID NO: 72581 - RNA, 19 nt, Artificial Sequence
  Chemically synthesized
gugugucacugugaggaag

SEQ ID NO: 72582 - RNA, 19 nt, Artificial Sequence
  Chemically synthesized
aggcaguugugagacagca

SEQ ID NO: 72583 - RNA, 19 nt, Artificial Sequence
  Chemically synthesized
aggugcgaguagaagacaa

SEQ ID NO: 72584 - RNA, 19 nt, Artificial Sequence
  Chemically synthesized
gauucaagggugccaagga

SEQ ID NO: 72585 - RNA, 19 nt, Artificial Sequence
  Chemically synthesized
gugcucagacgcaagaauu

SEQ ID NO: 72586 - RNA, 19 nt, Artificial Sequence
  Chemically synthesized
cauucuucaggugcgagua

SEQ ID NO: 72587 - RNA, 19 nt, Artificial Sequence
  Chemically synthesized
gccagccuaaaagucugug

SEQ ID NO: 72588 - RNA, 19 nt, Artificial Sequence
  Chemically synthesized
gaagagcaugugacggauc

SEQ ID NO: 72589 - RNA, 19 nt, Artificial Sequence
  Chemically synthesized
ggcaucucccagauucaag

SEQ ID NO: 72590 - RNA, 19 nt, Artificial Sequence
  Chemically synthesized
cagagcgaugagguucaca

SEQ ID NO: 72591 - RNA, 19 nt, Artificial Sequence
  Chemically synthesized
cucagagaggcaguuguga

SEQ ID NO: 72592 - RNA, 19 nt, Artificial Sequence
  Chemically synthesized
cgaauccucugaagcaucu

SEQ ID NO: 72593 - RNA, 19 nt, Artificial Sequence
  Chemically synthesized
agaagagcaugugacggau

SEQ ID NO: 72594 - RNA, 19 nt, Artificial Sequence
  Chemically synthesized
agugcucagacgcaagaau

SEQ ID NO: 72595 - RNA, 19 nt, Artificial Sequence
  Chemically synthesized
cgaguagaagacaaagcag

SEQ ID NO: 72596 - RNA, 19 nt, Artificial Sequence
  Chemically synthesized
acucuucgcccucgaacau

SEQ ID NO: 72597 - RNA, 19 nt, Artificial Sequence
  Chemically synthesized
ggaacagucugggcauuuc

SEQ ID NO: 72598 - RNA, 19 nt, Artificial Sequence
  Chemically synthesized
acaucuccaccgugucaga

SEQ ID NO: 72599 - RNA, 19 nt, Artificial Sequence
  Chemically synthesized
caguugugagacagcaaga

SEQ ID NO: 72600 - RNA, 19 nt, Artificial Sequence
  Chemically synthesized
ccaggagaagagcauguga

SEQ ID NO: 72601 - RNA, 19 nt, Artificial Sequence
  Chemically synthesized
ccugagcugugaugucauc

SEQ ID NO: 72602 - RNA, 19 nt, Artificial Sequence
  Chemically synthesized
aaaccacaaggaaccagga

SEQ ID NO: 72603 - RNA, 19 nt, Artificial Sequence
  Chemically synthesized
cagauucaagggugccaag

SEQ ID NO: 72604 - RNA, 19 nt, Artificial Sequence
  Chemically synthesized
agucugggcauuucuggaa

SEQ ID NO: 72605 - RNA, 19 nt, Artificial Sequence
  Chemically synthesized
cagucugggcauuucugga

SEQ ID NO: 72606 - RNA, 19 nt, Artificial Sequence
  Chemically synthesized
guagcguguccagcagauu

SEQ ID NO: 72607 - RNA, 19 nt, Artificial Sequence
  Chemically synthesized
gcaagaauuccaccugcag

SEQ ID NO: 72608 - RNA, 19 nt, Artificial Sequence
  Chemically synthesized
gcagauucugagagagauc

SEQ ID NO: 72609 - RNA, 19 nt, Artificial Sequence
  Chemically synthesized
cuguugaagcucaggucca

SEQ ID NO: 72610 - RNA, 19 nt, Artificial Sequence
  Chemically synthesized
gcgaguagaagacaaagca

SEQ ID NO: 72611 - RNA, 19 nt, Artificial Sequence
  Chemically synthesized
cacaggaaagcuguccaaa

SEQ ID NO: 72612 - RNA, 19 nt, Artificial Sequence
  Chemically synthesized
ccagauucaagggugccaa

SEQ ID NO: 72613 - RNA, 19 nt, Artificial Sequence
  Chemically synthesized
gcuguccaaaucugagguc

SEQ ID NO: 72614 - RNA, 19 nt, Artificial Sequence
  Chemically synthesized
agauucugagagagaucga

SEQ ID NO: 72615 - RNA, 19 nt, Artificial Sequence
  Chemically synthesized
ccacacacuggagagacuu

SEQ ID NO: 72616 - RNA, 19 nt, Artificial Sequence
  Chemically synthesized
cacauucuucaggugcgag

SEQ ID NO: 72617 - RNA, 19 nt, Artificial Sequence
  Chemically synthesized
gcaaagaacucuucgcccu

SEQ ID NO: 72618 - RNA, 19 nt, Artificial Sequence
  Chemically synthesized
caaucucaggagguagcgu

SEQ ID NO: 72619 - RNA, 19 nt, Artificial Sequence
  Chemically synthesized
cacacaguucuugguggug

SEQ ID NO: 72620 - RNA, 19 nt, Artificial Sequence
  Chemically synthesized
cugggcauuucuggaauga

SEQ ID NO: 72621 - RNA, 19 nt, Artificial Sequence
  Chemically synthesized
gaauaucugggccagccua

SEQ ID NO: 72622 - RNA, 19 nt, Artificial Sequence
  Chemically synthesized
cgguugugugucacuguga

SEQ ID NO: 72623 - RNA, 19 nt, Artificial Sequence
  Chemically synthesized
caggugcgaguagaagaca

SEQ ID NO: 72624 - RNA, 19 nt, Artificial Sequence
  Chemically synthesized
cucccacacaguucuuggu

SEQ ID NO: 72625 - RNA, 19 nt, Artificial Sequence
  Chemically synthesized
ggaucugcucauccagauc

SEQ ID NO: 72626 - RNA, 19 nt, Artificial Sequence
  Chemically synthesized
cacacuggagagacuugaa

SEQ ID NO: 72627 - RNA, 19 nt, Artificial Sequence
  Chemically synthesized
cacaaggaaccaggagaag

SEQ ID NO: 72628 - RNA, 19 nt, Artificial Sequence
  Chemically synthesized
ggaaagcuguccaaaucug

SEQ ID NO: 72629 - RNA, 19 nt, Artificial Sequence
  Chemically synthesized
gucugggcauuucuggaau

SEQ ID NO: 72630 - RNA, 19 nt, Artificial Sequence
  Chemically synthesized
agguugcugugcaggacaa

SEQ ID NO: 72631 - RNA, 19 nt, Artificial Sequence
  Chemically synthesized
cguguccagcagauucuga

SEQ ID NO: 72632 - RNA, 19 nt, Artificial Sequence
  Chemically synthesized
agguugcucugcgucagaa

SEQ ID NO: 72633 - RNA, 19 nt, Artificial Sequence
  Chemically synthesized
gaacaucuccaccguguca

SEQ ID NO: 72634 - RNA, 19 nt, Artificial Sequence
  Chemically synthesized
gaagucucggcagcuugau

SEQ ID NO: 72635 - RNA, 19 nt, Artificial Sequence
  Chemically synthesized
gguugcucugcgucagaaa

SEQ ID NO: 72636 - RNA, 19 nt, Artificial Sequence
  Chemically synthesized
ccaaaucugaggucaggaa

SEQ ID NO: 72637 - RNA, 19 nt, Artificial Sequence
  Chemically synthesized
ggcaguugugagacagcaa

SEQ ID NO: 72638 - RNA, 19 nt, Artificial Sequence
  Chemically synthesized
agaacucuucgcccucgaa

SEQ ID NO: 72639 - RNA, 19 nt, Artificial Sequence
  Chemically synthesized
ggaaaccacaaggaaccag

SEQ ID NO: 72640 - RNA, 19 nt, Artificial Sequence
  Chemically synthesized
cgcaagaauuccaccugca

SEQ ID NO: 72641 - RNA, 19 nt, Artificial Sequence
  Chemically synthesized
cagcagauucugagagaga

SEQ ID NO: 72642 - RNA, 19 nt, Artificial Sequence
  Chemically synthesized
ggugcgaguagaagacaaa

SEQ ID NO: 72643 - RNA, 19 nt, Artificial Sequence
  Chemically synthesized
gcauuucuggaaugagggc

SEQ ID NO: 72644 - RNA, 19 nt, Artificial Sequence
  Chemically synthesized
ccagcagauucugagagag

SEQ ID NO: 72645 - RNA, 19 nt, Artificial Sequence
  Chemically synthesized
gugucacugugaggaaggu

SEQ ID NO: 72646 - RNA, 19 nt, Artificial Sequence
  Chemically synthesized
cggaucugcucauccagau

SEQ ID NO: 72647 - RNA, 19 nt, Artificial Sequence
  Chemically synthesized
ccuucacauucuucaggug

SEQ ID NO: 72648 - RNA, 19 nt, Artificial Sequence
  Chemically synthesized
gagugcucagacgcaagaa

SEQ ID NO: 72649 - RNA, 19 nt, Artificial Sequence
  Chemically synthesized
ggaugcuguccugguacuu

SEQ ID NO: 72650 - RNA, 19 nt, Artificial Sequence
  Chemically synthesized
cauccagaucaucccggaa

SEQ ID NO: 72651 - RNA, 19 nt, Artificial Sequence
  Chemically synthesized
ccacacaguucuugguggu

SEQ ID NO: 72652 - RNA, 19 nt, Artificial Sequence
  Chemically synthesized
gugucuccaggcuguugaa

SEQ ID NO: 72653 - RNA, 19 nt, Artificial Sequence
  Chemically synthesized
ccacaaggaaccaggagaa

SEQ ID NO: 72654 - RNA, 19 nt, Artificial Sequence
  Chemically synthesized
ccuccaaucucaggaggua

SEQ ID NO: 72655 - RNA, 19 nt, Artificial Sequence
  Chemically synthesized
cggcaucucccagauucaa

SEQ ID NO: 72656 - RNA, 19 nt, Artificial Sequence
  Chemically synthesized
cacaguucuugguggugua

SEQ ID NO: 72657 - RNA, 19 nt, Artificial Sequence
  Chemically synthesized
ggccagccuaaaagucugu

SEQ ID NO: 72658 - RNA, 19 nt, Artificial Sequence
  Chemically synthesized
gagaggcaguugugagaca

SEQ ID NO: 72659 - RNA, 19 nt, Artificial Sequence
  Chemically synthesized
caggaacagucugggcauu

SEQ ID NO: 72660 - RNA, 19 nt, Artificial Sequence
  Chemically synthesized
gggaaaccacaaggaacca

SEQ ID NO: 72661 - RNA, 21 nt, Artificial Sequence
  Chemically synthesized
cuuccucacagugacacacaa

SEQ ID NO: 72662 - RNA, 21 nt, Artificial Sequence
  Chemically synthesized
guuccugaccucagauuugga

SEQ ID NO: 72663 - RNA, 21 nt, Artificial Sequence
  Chemically synthesized
acuuuuaggcuggcccagaua

SEQ ID NO: 72664 - RNA, 21 nt, Artificial Sequence
  Chemically synthesized
cuugaaucugggagaugccga

SEQ ID NO: 72665 - RNA, 21 nt, Artificial Sequence
  Chemically synthesized
agguggaauucuugcgucuga

SEQ ID NO: 72666 - RNA, 21 nt, Artificial Sequence
  Chemically synthesized
agaugcuucagaggauucgga

SEQ ID NO: 72667 - RNA, 21 nt, Artificial Sequence
  Chemically synthesized
cuuuuaggcuggcccagauau

SEQ ID NO: 72668 - RNA, 21 nt, Artificial Sequence
  Chemically synthesized
ugagcuucaacagccuggaga

SEQ ID NO: 72669 - RNA, 21 nt, Artificial Sequence
  Chemically synthesized
ucuggaugagcagauccguca

SEQ ID NO: 72670 - RNA, 21 nt, Artificial Sequence
  Chemically synthesized
ccaccuucaagucucuccagu

SEQ ID NO: 72671 - RNA, 21 nt, Artificial Sequence
  Chemically synthesized
ccugaagaaugugaaggaggu

SEQ ID NO: 72672 - RNA, 21 nt, Artificial Sequence
  Chemically synthesized
cagacuguuccugaccucaga

SEQ ID NO: 72673 - RNA, 21 nt, Artificial Sequence
  Chemically synthesized
gacuuuuaggcuggcccagau

SEQ ID NO: 72674 - RNA, 21 nt, Artificial Sequence
  Chemically synthesized
agaguucuuugcggccuucga

SEQ ID NO: 72675 - RNA, 21 nt, Artificial Sequence
  Chemically synthesized
ccuucaagucucuccagugug

SEQ ID NO: 72676 - RNA, 21 nt, Artificial Sequence
  Chemically synthesized
agauguucgagggcgaagagu

SEQ ID NO: 72677 - RNA, 21 nt, Artificial Sequence
  Chemically synthesized
agacuuuuaggcuggcccaga

SEQ ID NO: 72678 - RNA, 21 nt, Artificial Sequence
  Chemically synthesized
cuucuacucgcaccugaagaa

SEQ ID NO: 72679 - RNA, 21 nt, Artificial Sequence
  Chemically synthesized
gauguucgagggcgaagaguu

SEQ ID NO: 72680 - RNA, 21 nt, Artificial Sequence
  Chemically synthesized
accuggaccugagcuucaaca

SEQ ID NO: 72681 - RNA, 21 nt, Artificial Sequence
  Chemically synthesized
uugucuucuacucgcaccuga

SEQ ID NO: 72682 - RNA, 21 nt, Artificial Sequence
  Chemically synthesized
uguggagggcagaaucugcuu

SEQ ID NO: 72683 - RNA, 21 nt, Artificial Sequence
  Chemically synthesized
ucaggacccggaaugacaaca

SEQ ID NO: 72684 - RNA, 21 nt, Artificial Sequence
  Chemically synthesized
uggcagcccucauuccagaaa

SEQ ID NO: 72685 - RNA, 21 nt, Artificial Sequence
  Chemically synthesized
gaugcuucagaggauucggac

SEQ ID NO: 72686 - RNA, 21 nt, Artificial Sequence
  Chemically synthesized
gggaugaucuggaugagcaga

SEQ ID NO: 72687 - RNA, 21 nt, Artificial Sequence
  Chemically synthesized
guucgagggcgaagaguucuu

SEQ ID NO: 72688 - RNA, 21 nt, Artificial Sequence
  Chemically synthesized
guuccgggaugaucuggauga

SEQ ID NO: 72689 - RNA, 21 nt, Artificial Sequence
  Chemically synthesized
cuucaagucucuccagugugu

SEQ ID NO: 72690 - RNA, 21 nt, Artificial Sequence
  Chemically synthesized
ucuucuacucgcaccugaaga

SEQ ID NO: 72691 - RNA, 21 nt, Artificial Sequence
  Chemically synthesized
guggaauucuugcgucugagc

SEQ ID NO: 72692 - RNA, 21 nt, Artificial Sequence
  Chemically synthesized
ccucauuccagaaaugcccag

SEQ ID NO: 72693 - RNA, 21 nt, Artificial Sequence
  Chemically synthesized
cucaccuuccucacagugaca

SEQ ID NO: 72694 - RNA, 21 nt, Artificial Sequence
  Chemically synthesized
uuggcacccuugaaucuggga

SEQ ID NO: 72695 - RNA, 21 nt, Artificial Sequence
  Chemically synthesized
agggcagaaucugcuuugucu

SEQ ID NO: 72696 - RNA, 21 nt, Artificial Sequence
  Chemically synthesized
cuucaacagccuggagacacu

SEQ ID NO: 72697 - RNA, 21 nt, Artificial Sequence
  Chemically synthesized
accugaagaaugugaaggagg

SEQ ID NO: 72698 - RNA, 21 nt, Artificial Sequence
  Chemically synthesized
acucgcaccugaagaauguga

SEQ ID NO: 72699 - RNA, 21 nt, Artificial Sequence
  Chemically synthesized
ugacacgguggagauguucga

SEQ ID NO: 72700 - RNA, 21 nt, Artificial Sequence
  Chemically synthesized
ucucucagaaucugcuggaca

SEQ ID NO: 72701 - RNA, 21 nt, Artificial Sequence
  Chemically synthesized
cuuugucuucuacucgcaccu

SEQ ID NO: 72702 - RNA, 21 nt, Artificial Sequence
  Chemically synthesized
acuguguggagggcagaaucu

SEQ ID NO: 72703 - RNA, 21 nt, Artificial Sequence
  Chemically synthesized
ugacaucacagcucagguggu

SEQ ID NO: 72704 - RNA, 21 nt, Artificial Sequence
  Chemically synthesized
ccucagauuuggacagcuuuc

SEQ ID NO: 72705 - RNA, 21 nt, Artificial Sequence
  Chemically synthesized
agauccgucacaugcucuucu

SEQ ID NO: 72706 - RNA, 21 nt, Artificial Sequence
  Chemically synthesized
uggaugagcagauccgucaca

SEQ ID NO: 72707 - RNA, 21 nt, Artificial Sequence
  Chemically synthesized
cuacucgcaccugaagaaugu

SEQ ID NO: 72708 - RNA, 21 nt, Artificial Sequence
  Chemically synthesized
ugugaaccucaucgcucugca

SEQ ID NO: 72709 - RNA, 21 nt, Artificial Sequence
  Chemically synthesized
ggagaugcuucagaggauucg

SEQ ID NO: 72710 - RNA, 21 nt, Artificial Sequence
  Chemically synthesized
ugagcagauccgucacaugcu

SEQ ID NO: 72711 - RNA, 21 nt, Artificial Sequence
  Chemically synthesized
cuugcugucucacaacugccu

SEQ ID NO: 72712 - RNA, 21 nt, Artificial Sequence
  Chemically synthesized
aaaugcccagacuguuccuga

SEQ ID NO: 72713 - RNA, 21 nt, Artificial Sequence
  Chemically synthesized
aaguaccaggacagcauccga

SEQ ID NO: 72714 - RNA, 21 nt, Artificial Sequence
  Chemically synthesized
guggagggcagaaucugcuuu

SEQ ID NO: 72715 - RNA, 21 nt, Artificial Sequence
  Chemically synthesized
cagauuuggacagcuuuccug

SEQ ID NO: 72716 - RNA, 21 nt, Artificial Sequence
  Chemically synthesized
uggaauucuugcgucugagca

SEQ ID NO: 72717 - RNA, 21 nt, Artificial Sequence
  Chemically synthesized
uguucgagggcgaagaguucu

SEQ ID NO: 72718 - RNA, 21 nt, Artificial Sequence
  Chemically synthesized
auuuggacagcuuuccuguga

SEQ ID NO: 72719 - RNA, 21 nt, Artificial Sequence
  Chemically synthesized
uccugaccucagauuuggaca

SEQ ID NO: 72720 - RNA, 21 nt, Artificial Sequence
  Chemically synthesized
uuuuaggcuggcccagauauu

SEQ ID NO: 72721 - RNA, 21 nt, Artificial Sequence
  Chemically synthesized
ucuacucgcaccugaagaaug

SEQ ID NO: 72722 - RNA, 21 nt, Artificial Sequence
  Chemically synthesized
ucugguacaccaccaagaacu

SEQ ID NO: 72723 - RNA, 21 nt, Artificial Sequence
  Chemically synthesized
cucugguacaccaccaagaac

SEQ ID NO: 72724 - RNA, 21 nt, Artificial Sequence
  Chemically synthesized
aauucuugcgucugagcacuc

SEQ ID NO: 72725 - RNA, 21 nt, Artificial Sequence
  Chemically synthesized
ucgagggcgaagaguucuuug

SEQ ID NO: 72726 - RNA, 21 nt, Artificial Sequence
  Chemically synthesized
cauuccagaaaugcccagacu

SEQ ID NO: 72727 - RNA, 21 nt, Artificial Sequence
  Chemically synthesized
agaaucugcuggacacgcuac

SEQ ID NO: 72728 - RNA, 21 nt, Artificial Sequence
  Chemically synthesized
gaugagcagauccgucacaug

SEQ ID NO: 72729 - RNA, 21 nt, Artificial Sequence
  Chemically synthesized
acgcuaccuccugagauugga

SEQ ID NO: 72730 - RNA, 21 nt, Artificial Sequence
  Chemically synthesized
aguuccgggaugaucuggaug

SEQ ID NO: 72731 - RNA, 21 nt, Artificial Sequence
  Chemically synthesized
cuuucugacgcagagcaaccu

SEQ ID NO: 72732 - RNA, 21 nt, Artificial Sequence
  Chemically synthesized
gguacaccaccaagaacugug

SEQ ID NO: 72733 - RNA, 21 nt, Artificial Sequence
  Chemically synthesized
gauuuggacagcuuuccugug

SEQ ID NO: 72734 - RNA, 21 nt, Artificial Sequence
  Chemically synthesized
uggagggcagaaucugcuuug

SEQ ID NO: 72735 - RNA, 21 nt, Artificial Sequence
  Chemically synthesized
aagaguucuuugcggccuucg

SEQ ID NO: 72736 - RNA, 21 nt, Artificial Sequence
  Chemically synthesized
ugcugucucacaacugccucu

SEQ ID NO: 72737 - RNA, 21 nt, Artificial Sequence
  Chemically synthesized
acagacuuuuaggcuggccca

SEQ ID NO: 72738 - RNA, 21 nt, Artificial Sequence
  Chemically synthesized
gauccgucacaugcucuucuc

SEQ ID NO: 72739 - RNA, 21 nt, Artificial Sequence
  Chemically synthesized
gcuuugucuucuacucgcacc

SEQ ID NO: 72740 - RNA, 21 nt, Artificial Sequence
  Chemically synthesized
cacuucuccugguuccuugug

SEQ ID NO: 72741 - RNA, 21 nt, Artificial Sequence
  Chemically synthesized
auuccagaaaugcccagacug

SEQ ID NO: 72742 - RNA, 21 nt, Artificial Sequence
  Chemically synthesized
agcugcugcagguggaauucu

SEQ ID NO: 72743 - RNA, 21 nt, Artificial Sequence
  Chemically synthesized
cucucagaaucugcuggacac

SEQ ID NO: 72744 - RNA, 21 nt, Artificial Sequence
  Chemically synthesized
aucaagcugccgagacuucga

SEQ ID NO: 72745 - RNA, 21 nt, Artificial Sequence
  Chemically synthesized
accaccaagaacuguguggga

SEQ ID NO: 72746 - RNA, 21 nt, Artificial Sequence
  Chemically synthesized
ucagaaucugcuggacacgcu

SEQ ID NO: 72747 - RNA, 21 nt, Artificial Sequence
  Chemically synthesized
uccgucacaugcucuucuccu

SEQ ID NO: 72748 - RNA, 21 nt, Artificial Sequence
  Chemically synthesized
gucuucuacucgcaccugaag

SEQ ID NO: 72749 - RNA, 21 nt, Artificial Sequence
  Chemically synthesized
ucucucucagaaucugcugga

SEQ ID NO: 72750 - RNA, 21 nt, Artificial Sequence
  Chemically synthesized
caccuucaagucucuccagug

SEQ ID NO: 72751 - RNA, 21 nt, Artificial Sequence
  Chemically synthesized
auucuugcgucugagcacuca

SEQ ID NO: 72752 - RNA, 21 nt, Artificial Sequence
  Chemically synthesized
ugaaucugggagaugccgaga

SEQ ID NO: 72753 - RNA, 21 nt, Artificial Sequence
  Chemically synthesized
cuccuuggcacccuugaaucu

SEQ ID NO: 72754 - RNA, 21 nt, Artificial Sequence
  Chemically synthesized
gaauucuugcgucugagcacu

SEQ ID NO: 72755 - RNA, 21 nt, Artificial Sequence
  Chemically synthesized
accugggaugacaucacagcu

SEQ ID NO: 72756 - RNA, 21 nt, Artificial Sequence
  Chemically synthesized
uucuccugguuccuugugguu

SEQ ID NO: 72757 - RNA, 21 nt, Artificial Sequence
  Chemically synthesized
uuccucacagugacacacaac

SEQ ID NO: 72758 - RNA, 21 nt, Artificial Sequence
  Chemically synthesized
ucuccugguuccuugugguuu

SEQ ID NO: 72759 - RNA, 21 nt, Artificial Sequence
  Chemically synthesized
cugcagguggaauucuugcgu

SEQ ID NO: 72760 - RNA, 21 nt, Artificial Sequence
  Chemically synthesized
cuguuccugaccucagauuug

SEQ ID NO: 72761 - RNA, 21 nt, Artificial Sequence
  Chemically synthesized
cagaaaugcccagacuguucc

SEQ ID NO: 72762 - RNA, 21 nt, Artificial Sequence
  Chemically synthesized
uccucacagugacacacaacc

SEQ ID NO: 72763 - RNA, 21 nt, Artificial Sequence
  Chemically synthesized
agcuucaacagccuggagaca

SEQ ID NO: 72764 - RNA, 21 nt, Artificial Sequence
  Chemically synthesized
gaucuggaugagcagauccgu

SEQ ID NO: 72765 - RNA, 21 nt, Artificial Sequence
  Chemically synthesized
ugaucuggaugagcagauccg

SEQ ID NO: 72766 - RNA, 21 nt, Artificial Sequence
  Chemically synthesized
ugguacaccaccaagaacugu

SEQ ID NO: 72767 - RNA, 21 nt, Artificial Sequence
  Chemically synthesized
cucauuccagaaaugcccaga

SEQ ID NO: 72768 - RNA, 21 nt, Artificial Sequence
  Chemically synthesized
ucuugcugucucacaacugcc

SEQ ID NO: 72769 - RNA, 21 nt, Artificial Sequence
  Chemically synthesized
uucuacucgcaccugaagaau

SEQ ID NO: 72770 - RNA, 21 nt, Artificial Sequence
  Chemically synthesized
uuuggacagcuuuccugugac

SEQ ID NO: 72771 - RNA, 21 nt, Artificial Sequence
  Chemically synthesized
uugaaucugggagaugccgag

SEQ ID NO: 72772 - RNA, 21 nt, Artificial Sequence
  Chemically synthesized
uucuugcgucugagcacucac

SEQ ID NO: 72773 - RNA, 21 nt, Artificial Sequence
  Chemically synthesized
ccugaccucagauuuggacag

SEQ ID NO: 72774 - RNA, 21 nt, Artificial Sequence
  Chemically synthesized
accuucaagucucuccagugu

SEQ ID NO: 72775 - RNA, 21 nt, Artificial Sequence
  Chemically synthesized
ugcugcagguggaauucuugc

SEQ ID NO: 72776 - RNA, 21 nt, Artificial Sequence
  Chemically synthesized
cagcccucauuccagaaaugc

SEQ ID NO: 72777 - RNA, 21 nt, Artificial Sequence
  Chemically synthesized
gagaugcuucagaggauucgg

SEQ ID NO: 72778 - RNA, 21 nt, Artificial Sequence
  Chemically synthesized
ucgaucucucucagaaucugc

SEQ ID NO: 72779 - RNA, 21 nt, Artificial Sequence
  Chemically synthesized
cuucuccugguuccuuguggu

SEQ ID NO: 72780 - RNA, 21 nt, Artificial Sequence
  Chemically synthesized
uuccagaaaugcccagacugu

SEQ ID NO: 72781 - RNA, 21 nt, Artificial Sequence
  Chemically synthesized
ucaagucucuccagugugugg

SEQ ID NO: 72782 - RNA, 21 nt, Artificial Sequence
  Chemically synthesized
aucuggaugagcagauccguc

SEQ ID NO: 72783 - RNA, 21 nt, Artificial Sequence
  Chemically synthesized
cgcaccugaagaaugugaagg

SEQ ID NO: 72784 - RNA, 21 nt, Artificial Sequence
  Chemically synthesized
uguuccugaccucagauuugg

SEQ ID NO: 72785 - RNA, 21 nt, Artificial Sequence
  Chemically synthesized
gaucucucucagaaucugcug

SEQ ID NO: 72786 - RNA, 21 nt, Artificial Sequence
  Chemically synthesized
cucgaucucucucagaaucug

SEQ ID NO: 72787 - RNA, 21 nt, Artificial Sequence
  Chemically synthesized
gaugacaucacagcucaggug

SEQ ID NO: 72788 - RNA, 21 nt, Artificial Sequence
  Chemically synthesized
ucaccuuccucacagugacac

SEQ ID NO: 72789 - RNA, 21 nt, Artificial Sequence
  Chemically synthesized
cuccugguuccuugugguuuc

SEQ ID NO: 72790 - RNA, 21 nt, Artificial Sequence
  Chemically synthesized
augcuucagaggauucggacg

SEQ ID NO: 72791 - RNA, 21 nt, Artificial Sequence
  Chemically synthesized
auccgucacaugcucuucucc

SEQ ID NO: 72792 - RNA, 21 nt, Artificial Sequence
  Chemically synthesized
ucuccuuggcacccuugaauc

SEQ ID NO: 72793 - RNA, 21 nt, Artificial Sequence
  Chemically synthesized
agcccucauuccagaaaugcc

SEQ ID NO: 72794 - RNA, 21 nt, Artificial Sequence
  Chemically synthesized
uccuuggcacccuugaaucug

SEQ ID NO: 72795 - RNA, 21 nt, Artificial Sequence
  Chemically synthesized
ucucacaacugccucucugag

SEQ ID NO: 72796 - RNA, 21 nt, Artificial Sequence
  Chemically synthesized
uuccugaccucagauuuggac

SEQ ID NO: 72797 - RNA, 21 nt, Artificial Sequence
  Chemically synthesized
cucuugcugucucacaacugc

SEQ ID NO: 72798 - RNA, 21 nt, Artificial Sequence
  Chemically synthesized
ucugcuuugucuucuacucgc

SEQ ID NO: 72799 - RNA, 21 nt, Artificial Sequence
  Chemically synthesized
auguucgagggcgaagaguuc

SEQ ID NO: 72800 - RNA, 21 nt, Artificial Sequence
  Chemically synthesized
uacucgcaccugaagaaugug

SEQ ID NO: 72801 - RNA, 21 nt, Artificial Sequence
  Chemically synthesized
aucugcuuugucuucuacucg

SEQ ID NO: 72802 - RNA, 21 nt, Artificial Sequence
  Chemically synthesized
acaccaccaagaacugugugg

SEQ ID NO: 72803 - RNA, 21 nt, Artificial Sequence
  Chemically synthesized
aaucugcuggacacgcuaccu

SEQ ID NO: 72804 - RNA, 21 nt, Artificial Sequence
  Chemically synthesized
uucaagucucuccagugugug

SEQ ID NO: 72805 - RNA, 21 nt, Artificial Sequence
  Chemically synthesized
uuucugacgcagagcaaccug

SEQ ID NO: 72806 - RNA, 21 nt, Artificial Sequence
  Chemically synthesized
acuucuccugguuccuugugg

SEQ ID NO: 72807 - RNA, 21 nt, Artificial Sequence
  Chemically synthesized
ugcagguggaauucuugcguc

SEQ ID NO: 72808 - RNA, 21 nt, Artificial Sequence
  Chemically synthesized
cucagauuuggacagcuuucc

SEQ ID NO: 72809 - RNA, 21 nt, Artificial Sequence
  Chemically synthesized
aaugcccagacuguuccugac

SEQ ID NO: 72810 - RNA, 21 nt, Artificial Sequence
  Chemically synthesized
accuuccucacagugacacac

SEQ ID NO: 72811 - RNA, 21 nt, Artificial Sequence
  Chemically synthesized
ugucucacaacugccucucug

SEQ ID NO: 72812 - RNA, 21 nt, Artificial Sequence
  Chemically synthesized
gaugaucuggaugagcagauc

SEQ ID NO: 72813 - RNA, 21 nt, Artificial Sequence
  Chemically synthesized
ucugacacgguggagauguuc

SEQ ID NO: 72814 - RNA, 21 nt, Artificial Sequence
  Chemically synthesized
augacaucacagcucaggugg

SEQ ID NO: 72815 - RNA, 21 nt, Artificial Sequence
  Chemically synthesized
gaaaugcccagacuguuccug

SEQ ID NO: 72816 - RNA, 21 nt, Artificial Sequence
  Chemically synthesized
uuaggcuggcccagauauucc

SEQ ID NO: 72817 - RNA, 21 nt, Artificial Sequence
  Chemically synthesized
cagauccgucacaugcucuuc

SEQ ID NO: 72818 - RNA, 21 nt, Artificial Sequence
  Chemically synthesized
ucacaacugccucucugagcu

SEQ ID NO: 72819 - RNA, 21 nt, Artificial Sequence
  Chemically synthesized
ucucagaaucugcuggacacg

SEQ ID NO: 72820 - RNA, 21 nt, Artificial Sequence
  Chemically synthesized
aaucugcuuugucuucuacuc

SEQ ID NO: 72821 - RNA, 21 nt, Artificial Sequence
  Chemically synthesized
uucgagggcgaagaguucuuu

SEQ ID NO: 72822 - RNA, 21 nt, Artificial Sequence
  Chemically synthesized
uuuaggcuggcccagauauuc

SEQ ID NO: 72823 - RNA, 21 nt, Artificial Sequence
  Chemically synthesized
augagcagauccgucacaugc

SEQ ID NO: 72824 - RNA, 21 nt, Artificial Sequence
  Chemically synthesized
uugcugucucacaacugccuc

SEQ ID NO: 72825 - RNA, 21 nt, Artificial Sequence
  Chemically synthesized
cucucucagaaucugcuggac

SEQ ID NO: 72826 - RNA, 21 nt, Artificial Sequence
  Chemically synthesized
augaucuggaugagcagaucc

SEQ ID NO: 72827 - RNA, 21 nt, Artificial Sequence
  Chemically synthesized
uucaacagccuggagacacug

SEQ ID NO: 72828 - RNA, 21 nt, Artificial Sequence
  Chemically synthesized
uuggacagcuuuccugugacc

SEQ ID NO: 72829 - RNA, 21 nt, Artificial Sequence
  Chemically synthesized
acccuugaaucugggagaugc

SEQ ID NO: 72830 - RNA, 21 nt, Artificial Sequence
  Chemically synthesized
uccugguuccuugugguuucc

SEQ ID NO: 72831 - RNA, 21 nt, Artificial Sequence
  Chemically synthesized
aucucucucagaaucugcugg

SEQ ID NO: 72832 - RNA, 21 nt, Artificial Sequence
  Chemically synthesized
cugaccucagauuuggacagc

SEQ ID NO: 72833 - RNA, 21 nt, Artificial Sequence
  Chemically synthesized
uuugucuucuacucgcaccug

SEQ ID NO: 72834 - RNA, 21 nt, Artificial Sequence
  Chemically synthesized
uacaccaccaagaacugugug

SEQ ID NO: 72835 - RNA, 21 nt, Artificial Sequence
  Chemically synthesized
uuccgggaugaucuggaugag

SEQ ID NO: 72836 - RNA, 21 nt, Artificial Sequence
  Chemically synthesized
uugugugucacugugaggaag

SEQ ID NO: 72837 - RNA, 21 nt, Artificial Sequence
  Chemically synthesized
uccaaaucugaggucaggaac

SEQ ID NO: 72838 - RNA, 21 nt, Artificial Sequence
  Chemically synthesized
uaucugggccagccuaaaagu

SEQ ID NO: 72839 - RNA, 21 nt, Artificial Sequence
  Chemically synthesized
ucggcaucucccagauucaag

SEQ ID NO: 72840 - RNA, 21 nt, Artificial Sequence
  Chemically synthesized
ucagacgcaagaauuccaccu

SEQ ID NO: 72841 - RNA, 21 nt, Artificial Sequence
  Chemically synthesized
uccgaauccucugaagcaucu

SEQ ID NO: 72842 - RNA, 21 nt, Artificial Sequence
  Chemically synthesized
auaucugggccagccuaaaag

SEQ ID NO: 72843 - RNA, 21 nt, Artificial Sequence
  Chemically synthesized
ucuccaggcuguugaagcuca

SEQ ID NO: 72844 - RNA, 21 nt, Artificial Sequence
  Chemically synthesized
ugacggaucugcucauccaga

SEQ ID NO: 72845 - RNA, 21 nt, Artificial Sequence
  Chemically synthesized
acuggagagacuugaaggugg

SEQ ID NO: 72846 - RNA, 21 nt, Artificial Sequence
  Chemically synthesized
accuccuucacauucuucagg

SEQ ID NO: 72847 - RNA, 21 nt, Artificial Sequence
  Chemically synthesized
ucugaggucaggaacagucug

SEQ ID NO: 72848 - RNA, 21 nt, Artificial Sequence
  Chemically synthesized
aucugggccagccuaaaaguc

SEQ ID NO: 72849 - RNA, 21 nt, Artificial Sequence
  Chemically synthesized
ucgaaggccgcaaagaacucu

SEQ ID NO: 72850 - RNA, 21 nt, Artificial Sequence
  Chemically synthesized
cacacuggagagacuugaagg

SEQ ID NO: 72851 - RNA, 21 nt, Artificial Sequence
  Chemically synthesized
acucuucgcccucgaacaucu

SEQ ID NO: 72852 - RNA, 21 nt, Artificial Sequence
  Chemically synthesized
ucugggccagccuaaaagucu

SEQ ID NO: 72853 - RNA, 21 nt, Artificial Sequence
  Chemically synthesized
uucuucaggugcgaguagaag

SEQ ID NO: 72854 - RNA, 21 nt, Artificial Sequence
  Chemically synthesized
aacucuucgcccucgaacauc

SEQ ID NO: 72855 - RNA, 21 nt, Artificial Sequence
  Chemically synthesized
uguugaagcucagguccaggu

SEQ ID NO: 72856 - RNA, 21 nt, Artificial Sequence
  Chemically synthesized
ucaggugcgaguagaagacaa

SEQ ID NO: 72857 - RNA, 21 nt, Artificial Sequence
  Chemically synthesized
aagcagauucugcccuccaca

SEQ ID NO: 72858 - RNA, 21 nt, Artificial Sequence
  Chemically synthesized
uguugucauuccggguccuga

SEQ ID NO: 72859 - RNA, 21 nt, Artificial Sequence
  Chemically synthesized
uuucuggaaugagggcugcca

SEQ ID NO: 72860 - RNA, 21 nt, Artificial Sequence
  Chemically synthesized
guccgaauccucugaagcauc

SEQ ID NO: 72861 - RNA, 21 nt, Artificial Sequence
  Chemically synthesized
ucugcucauccagaucauccc

SEQ ID NO: 72862 - RNA, 21 nt, Artificial Sequence
  Chemically synthesized
aagaacucuucgcccucgaac

SEQ ID NO: 72863 - RNA, 21 nt, Artificial Sequence
  Chemically synthesized
ucauccagaucaucccggaac

SEQ ID NO: 72864 - RNA, 21 nt, Artificial Sequence
  Chemically synthesized
acacacuggagagacuugaag

SEQ ID NO: 72865 - RNA, 21 nt, Artificial Sequence
  Chemically synthesized
ucuucaggugcgaguagaaga

SEQ ID NO: 72866 - RNA, 21 nt, Artificial Sequence
  Chemically synthesized
gcucagacgcaagaauuccac

SEQ ID NO: 72867 - RNA, 21 nt, Artificial Sequence
  Chemically synthesized
cugggcauuucuggaaugagg

SEQ ID NO: 72868 - RNA, 21 nt, Artificial Sequence
  Chemically synthesized
ugucacugugaggaaggugag

SEQ ID NO: 72869 - RNA, 21 nt, Artificial Sequence
  Chemically synthesized
ucccagauucaagggugccaa

SEQ ID NO: 72870 - RNA, 21 nt, Artificial Sequence
  Chemically synthesized
agacaaagcagauucugcccu

SEQ ID NO: 72871 - RNA, 21 nt, Artificial Sequence
  Chemically synthesized
agugucuccaggcuguugaag

SEQ ID NO: 72872 - RNA, 21 nt, Artificial Sequence
  Chemically synthesized
ccuccuucacauucuucaggu

SEQ ID NO: 72873 - RNA, 21 nt, Artificial Sequence
  Chemically synthesized
ucacauucuucaggugcgagu

SEQ ID NO: 72874 - RNA, 21 nt, Artificial Sequence
  Chemically synthesized
ucgaacaucuccaccguguca

SEQ ID NO: 72875 - RNA, 21 nt, Artificial Sequence
  Chemically synthesized
uguccagcagauucugagaga

SEQ ID NO: 72876 - RNA, 21 nt, Artificial Sequence
  Chemically synthesized
aggugcgaguagaagacaaag

SEQ ID NO: 72877 - RNA, 21 nt, Artificial Sequence
  Chemically synthesized
agauucugcccuccacacagu

SEQ ID NO: 72878 - RNA, 21 nt, Artificial Sequence
  Chemically synthesized
accaccugagcugugauguca

SEQ ID NO: 72879 - RNA, 21 nt, Artificial Sequence
  Chemically synthesized
gaaagcuguccaaaucugagg

SEQ ID NO: 72880 - RNA, 21 nt, Artificial Sequence
  Chemically synthesized
agaagagcaugugacggaucu

SEQ ID NO: 72881 - RNA, 21 nt, Artificial Sequence
  Chemically synthesized
ugugacggaucugcucaucca

SEQ ID NO: 72882 - RNA, 21 nt, Artificial Sequence
  Chemically synthesized
acauucuucaggugcgaguag

SEQ ID NO: 72883 - RNA, 21 nt, Artificial Sequence
  Chemically synthesized
ugcagagcgaugagguucaca

SEQ ID NO: 72884 - RNA, 21 nt, Artificial Sequence
  Chemically synthesized
cgaauccucugaagcaucucc

SEQ ID NO: 72885 - RNA, 21 nt, Artificial Sequence
  Chemically synthesized
agcaugugacggaucugcuca

SEQ ID NO: 72886 - RNA, 21 nt, Artificial Sequence
  Chemically synthesized
aggcaguugugagacagcaag

SEQ ID NO: 72887 - RNA, 21 nt, Artificial Sequence
  Chemically synthesized
ucaggaacagucugggcauuu

SEQ ID NO: 72888 - RNA, 21 nt, Artificial Sequence
  Chemically synthesized
ucggaugcuguccugguacuu

SEQ ID NO: 72889 - RNA, 21 nt, Artificial Sequence
  Chemically synthesized
aaagcagauucugcccuccac

SEQ ID NO: 72890 - RNA, 21 nt, Artificial Sequence
  Chemically synthesized
caggaaagcuguccaaaucug

SEQ ID NO: 72891 - RNA, 21 nt, Artificial Sequence
  Chemically synthesized
ugcucagacgcaagaauucca

SEQ ID NO: 72892 - RNA, 21 nt, Artificial Sequence
  Chemically synthesized
agaacucuucgcccucgaaca

SEQ ID NO: 72893 - RNA, 21 nt, Artificial Sequence
  Chemically synthesized
ucacaggaaagcuguccaaau

SEQ ID NO: 72894 - RNA, 21 nt, Artificial Sequence
  Chemically synthesized
uguccaaaucugaggucagga

SEQ ID NO: 72895 - RNA, 21 nt, Artificial Sequence
  Chemically synthesized
aauaucugggccagccuaaaa

SEQ ID NO: 72896 - RNA, 21 nt, Artificial Sequence
  Chemically synthesized
cauucuucaggugcgaguaga

SEQ ID NO: 72897 - RNA, 21 nt, Artificial Sequence
  Chemically synthesized
aguucuuggugguguaccaga

SEQ ID NO: 72898 - RNA, 21 nt, Artificial Sequence
  Chemically synthesized
guucuuggugguguaccagag

SEQ ID NO: 72899 - RNA, 21 nt, Artificial Sequence
  Chemically synthesized
gagugcucagacgcaagaauu

SEQ ID NO: 72900 - RNA, 21 nt, Artificial Sequence
  Chemically synthesized
caaagaacucuucgcccucga

SEQ ID NO: 72901 - RNA, 21 nt, Artificial Sequence
  Chemically synthesized
agucugggcauuucuggaaug

SEQ ID NO: 72902 - RNA, 21 nt, Artificial Sequence
  Chemically synthesized
guagcguguccagcagauucu

SEQ ID NO: 72903 - RNA, 21 nt, Artificial Sequence
  Chemically synthesized
caugugacggaucugcucauc

SEQ ID NO: 72904 - RNA, 21 nt, Artificial Sequence
  Chemically synthesized
uccaaucucaggagguagcgu

SEQ ID NO: 72905 - RNA, 21 nt, Artificial Sequence
  Chemically synthesized
cauccagaucaucccggaacu

SEQ ID NO: 72906 - RNA, 21 nt, Artificial Sequence
  Chemically synthesized
agguugcucugcgucagaaag

SEQ ID NO: 72907 - RNA, 21 nt, Artificial Sequence
  Chemically synthesized
cacaguucuuggugguguacc

SEQ ID NO: 72908 - RNA, 21 nt, Artificial Sequence
  Chemically synthesized
cacaggaaagcuguccaaauc

SEQ ID NO: 72909 - RNA, 21 nt, Artificial Sequence
  Chemically synthesized
caaagcagauucugcccucca

SEQ ID NO: 72910 - RNA, 21 nt, Artificial Sequence
  Chemically synthesized
cgaaggccgcaaagaacucuu

SEQ ID NO: 72911 - RNA, 21 nt, Artificial Sequence
  Chemically synthesized
agaggcaguugugagacagca

SEQ ID NO: 72912 - RNA, 21 nt, Artificial Sequence
  Chemically synthesized
ugggccagccuaaaagucugu

SEQ ID NO: 72913 - RNA, 21 nt, Artificial Sequence
  Chemically synthesized
gagaagagcaugugacggauc

SEQ ID NO: 72914 - RNA, 21 nt, Artificial Sequence
  Chemically synthesized
ggugcgaguagaagacaaagc

SEQ ID NO: 72915 - RNA, 21 nt, Artificial Sequence
  Chemically synthesized
cacaaggaaccaggagaagug

SEQ ID NO: 72916 - RNA, 21 nt, Artificial Sequence
  Chemically synthesized
cagucugggcauuucuggaau

SEQ ID NO: 72917 - RNA, 21 nt, Artificial Sequence
  Chemically synthesized
agaauuccaccugcagcagcu

SEQ ID NO: 72918 - RNA, 21 nt, Artificial Sequence
  Chemically synthesized
guguccagcagauucugagag

SEQ ID NO: 72919 - RNA, 21 nt, Artificial Sequence
  Chemically synthesized
ucgaagucucggcagcuugau

SEQ ID NO: 72920 - RNA, 21 nt, Artificial Sequence
  Chemically synthesized
ucccacacaguucuugguggu

SEQ ID NO: 72921 - RNA, 21 nt, Artificial Sequence
  Chemically synthesized
agcguguccagcagauucuga

SEQ ID NO: 72922 - RNA, 21 nt, Artificial Sequence
  Chemically synthesized
aggagaagagcaugugacgga

SEQ ID NO: 72923 - RNA, 21 nt, Artificial Sequence
  Chemically synthesized
cuucaggugcgaguagaagac

SEQ ID NO: 72924 - RNA, 21 nt, Artificial Sequence
  Chemically synthesized
uccagcagauucugagagaga

SEQ ID NO: 72925 - RNA, 21 nt, Artificial Sequence
  Chemically synthesized
cacuggagagacuugaaggug

SEQ ID NO: 72926 - RNA, 21 nt, Artificial Sequence
  Chemically synthesized
ugagugcucagacgcaagaau

SEQ ID NO: 72927 - RNA, 21 nt, Artificial Sequence
  Chemically synthesized
ucucggcaucucccagauuca

SEQ ID NO: 72928 - RNA, 21 nt, Artificial Sequence
  Chemically synthesized
agauucaagggugccaaggag

SEQ ID NO: 72929 - RNA, 21 nt, Artificial Sequence
  Chemically synthesized
agugcucagacgcaagaauuc

SEQ ID NO: 72930 - RNA, 21 nt, Artificial Sequence
  Chemically synthesized
agcugugaugucaucccaggu

SEQ ID NO: 72931 - RNA, 21 nt, Artificial Sequence
  Chemically synthesized
aaccacaaggaaccaggagaa

SEQ ID NO: 72932 - RNA, 21 nt, Artificial Sequence
  Chemically synthesized
guugugugucacugugaggaa

SEQ ID NO: 72933 - RNA, 21 nt, Artificial Sequence
  Chemically synthesized
aaaccacaaggaaccaggaga

SEQ ID NO: 72934 - RNA, 21 nt, Artificial Sequence
  Chemically synthesized
acgcaagaauuccaccugcag

SEQ ID NO: 72935 - RNA, 21 nt, Artificial Sequence
  Chemically synthesized
caaaucugaggucaggaacag

SEQ ID NO: 72936 - RNA, 21 nt, Artificial Sequence
  Chemically synthesized
ggaacagucugggcauuucug

SEQ ID NO: 72937 - RNA, 21 nt, Artificial Sequence
  Chemically synthesized
gguugugugucacugugagga

SEQ ID NO: 72938 - RNA, 21 nt, Artificial Sequence
  Chemically synthesized
ugucuccaggcuguugaagcu

SEQ ID NO: 72939 - RNA, 21 nt, Artificial Sequence
  Chemically synthesized
acggaucugcucauccagauc

SEQ ID NO: 72940 - RNA, 21 nt, Artificial Sequence
  Chemically synthesized
cggaucugcucauccagauca

SEQ ID NO: 72941 - RNA, 21 nt, Artificial Sequence
  Chemically synthesized
acaguucuuggugguguacca

SEQ ID NO: 72942 - RNA, 21 nt, Artificial Sequence
  Chemically synthesized
ucugggcauuucuggaaugag

SEQ ID NO: 72943 - RNA, 21 nt, Artificial Sequence
  Chemically synthesized
ggcaguugugagacagcaaga

SEQ ID NO: 72944 - RNA, 21 nt, Artificial Sequence
  Chemically synthesized
auucuucaggugcgaguagaa

SEQ ID NO: 72945 - RNA, 21 nt, Artificial Sequence
  Chemically synthesized
gucacaggaaagcuguccaaa

SEQ ID NO: 72946 - RNA, 21 nt, Artificial Sequence
  Chemically synthesized
cucggcaucucccagauucaa

SEQ ID NO: 72947 - RNA, 21 nt, Artificial Sequence
  Chemically synthesized
gugagugcucagacgcaagaa

SEQ ID NO: 72948 - RNA, 21 nt, Artificial Sequence
  Chemically synthesized
cuguccaaaucugaggucagg

SEQ ID NO: 72949 - RNA, 21 nt, Artificial Sequence
  Chemically synthesized
acacuggagagacuugaaggu

SEQ ID NO: 72950 - RNA, 21 nt, Artificial Sequence
  Chemically synthesized
gcaagaauuccaccugcagca

SEQ ID NO: 72951 - RNA, 21 nt, Artificial Sequence
  Chemically synthesized
gcauuucuggaaugagggcug

SEQ ID NO: 72952 - RNA, 21 nt, Artificial Sequence
  Chemically synthesized
ccgaauccucugaagcaucuc

SEQ ID NO: 72953 - RNA, 21 nt, Artificial Sequence
  Chemically synthesized
gcagauucugagagagaucga

SEQ ID NO: 72954 - RNA, 21 nt, Artificial Sequence
  Chemically synthesized
accacaaggaaccaggagaag

SEQ ID NO: 72955 - RNA, 21 nt, Artificial Sequence
  Chemically synthesized
acagucugggcauuucuggaa

SEQ ID NO: 72956 - RNA, 21 nt, Artificial Sequence
  Chemically synthesized
ccacacacuggagagacuuga

SEQ ID NO: 72957 - RNA, 21 nt, Artificial Sequence
  Chemically synthesized
gacggaucugcucauccagau

SEQ ID NO: 72958 - RNA, 21 nt, Artificial Sequence
  Chemically synthesized
ccuucacauucuucaggugcg

SEQ ID NO: 72959 - RNA, 21 nt, Artificial Sequence
  Chemically synthesized
ccaaaucugaggucaggaaca

SEQ ID NO: 72960 - RNA, 21 nt, Artificial Sequence
  Chemically synthesized
cagcagauucugagagagauc

SEQ ID NO: 72961 - RNA, 21 nt, Artificial Sequence
  Chemically synthesized
cagauucugagagagaucgag

SEQ ID NO: 72962 - RNA, 21 nt, Artificial Sequence
  Chemically synthesized
caccugagcugugaugucauc

SEQ ID NO: 72963 - RNA, 21 nt, Artificial Sequence
  Chemically synthesized
gugucacugugaggaagguga

SEQ ID NO: 72964 - RNA, 21 nt, Artificial Sequence
  Chemically synthesized
gaaaccacaaggaaccaggag

SEQ ID NO: 72965 - RNA, 21 nt, Artificial Sequence
  Chemically synthesized
cguccgaauccucugaagcau

SEQ ID NO: 72966 - RNA, 21 nt, Artificial Sequence
  Chemically synthesized
ggagaagagcaugugacggau

SEQ ID NO: 72967 - RNA, 21 nt, Artificial Sequence
  Chemically synthesized
gauucaagggugccaaggaga

SEQ ID NO: 72968 - RNA, 21 nt, Artificial Sequence
  Chemically synthesized
ggcauuucuggaaugagggcu

SEQ ID NO: 72969 - RNA, 21 nt, Artificial Sequence
  Chemically synthesized
cagauucaagggugccaagga

SEQ ID NO: 72970 - RNA, 21 nt, Artificial Sequence
  Chemically synthesized
cucagagaggcaguugugaga

SEQ ID NO: 72971 - RNA, 21 nt, Artificial Sequence
  Chemically synthesized
guccaaaucugaggucaggaa

SEQ ID NO: 72972 - RNA, 21 nt, Artificial Sequence
  Chemically synthesized
gcaguugugagacagcaagag

SEQ ID NO: 72973 - RNA, 21 nt, Artificial Sequence
  Chemically synthesized
gcgaguagaagacaaagcaga

SEQ ID NO: 72974 - RNA, 21 nt, Artificial Sequence
  Chemically synthesized
gaacucuucgcccucgaacau

SEQ ID NO: 72975 - RNA, 21 nt, Artificial Sequence
  Chemically synthesized
cacauucuucaggugcgagua

SEQ ID NO: 72976 - RNA, 21 nt, Artificial Sequence
  Chemically synthesized
cgaguagaagacaaagcagau

SEQ ID NO: 72977 - RNA, 21 nt, Artificial Sequence
  Chemically synthesized
ccacacaguucuugguggugu

SEQ ID NO: 72978 - RNA, 21 nt, Artificial Sequence
  Chemically synthesized
agguagcguguccagcagauu

SEQ ID NO: 72979 - RNA, 21 nt, Artificial Sequence
  Chemically synthesized
cacacacuggagagacuugaa

SEQ ID NO: 72980 - RNA, 21 nt, Artificial Sequence
  Chemically synthesized
cagguugcucugcgucagaaa

SEQ ID NO: 72981 - RNA, 21 nt, Artificial Sequence
  Chemically synthesized
ccacaaggaaccaggagaagu

SEQ ID NO: 72982 - RNA, 21 nt, Artificial Sequence
  Chemically synthesized
gacgcaagaauuccaccugca

SEQ ID NO: 72983 - RNA, 21 nt, Artificial Sequence
  Chemically synthesized
ggaaagcuguccaaaucugag

SEQ ID NO: 72984 - RNA, 21 nt, Artificial Sequence
  Chemically synthesized
gucaggaacagucugggcauu

SEQ ID NO: 72985 - RNA, 21 nt, Artificial Sequence
  Chemically synthesized
gugugucacugugaggaaggu

SEQ ID NO: 72986 - RNA, 21 nt, Artificial Sequence
  Chemically synthesized
cagagaggcaguugugagaca

SEQ ID NO: 72987 - RNA, 21 nt, Artificial Sequence
  Chemically synthesized
gaucugcucauccagaucauc

SEQ ID NO: 72988 - RNA, 21 nt, Artificial Sequence
  Chemically synthesized
gaacaucuccaccgugucaga

SEQ ID NO: 72989 - RNA, 21 nt, Artificial Sequence
  Chemically synthesized
ccaccugagcugugaugucau

SEQ ID NO: 72990 - RNA, 21 nt, Artificial Sequence
  Chemically synthesized
caggaacagucugggcauuuc

SEQ ID NO: 72991 - RNA, 21 nt, Artificial Sequence
  Chemically synthesized
ggaauaucugggccagccuaa

SEQ ID NO: 72992 - RNA, 21 nt, Artificial Sequence
  Chemically synthesized
gaagagcaugugacggaucug

SEQ ID NO: 72993 - RNA, 21 nt, Artificial Sequence
  Chemically synthesized
agcucagagaggcaguuguga

SEQ ID NO: 72994 - RNA, 21 nt, Artificial Sequence
  Chemically synthesized
cguguccagcagauucugaga

SEQ ID NO: 72995 - RNA, 21 nt, Artificial Sequence
  Chemically synthesized
gaguagaagacaaagcagauu

SEQ ID NO: 72996 - RNA, 21 nt, Artificial Sequence
  Chemically synthesized
aaagaacucuucgcccucgaa

SEQ ID NO: 72997 - RNA, 21 nt, Artificial Sequence
  Chemically synthesized
gaauaucugggccagccuaaa

SEQ ID NO: 72998 - RNA, 21 nt, Artificial Sequence
  Chemically synthesized
gcaugugacggaucugcucau

SEQ ID NO: 72999 - RNA, 21 nt, Artificial Sequence
  Chemically synthesized
gaggcaguugugagacagcaa

SEQ ID NO: 73000 - RNA, 21 nt, Artificial Sequence
  Chemically synthesized
guccagcagauucugagagag

SEQ ID NO: 73001 - RNA, 21 nt, Artificial Sequence
  Chemically synthesized
ggaucugcucauccagaucau

SEQ ID NO: 73002 - RNA, 21 nt, Artificial Sequence
  Chemically synthesized
cagugucuccaggcuguugaa

SEQ ID NO: 73003 - RNA, 21 nt, Artificial Sequence
  Chemically synthesized
ggucacaggaaagcuguccaa

SEQ ID NO: 73004 - RNA, 21 nt, Artificial Sequence
  Chemically synthesized
gcaucucccagauucaagggu

SEQ ID NO: 73005 - RNA, 21 nt, Artificial Sequence
  Chemically synthesized
ggaaaccacaaggaaccagga

SEQ ID NO: 73006 - RNA, 21 nt, Artificial Sequence
  Chemically synthesized
ccagcagauucugagagagau

SEQ ID NO: 73007 - RNA, 21 nt, Artificial Sequence
  Chemically synthesized
gcuguccaaaucugaggucag

SEQ ID NO: 73008 - RNA, 21 nt, Artificial Sequence
  Chemically synthesized
caggugcgaguagaagacaaa

SEQ ID NO: 73009 - RNA, 21 nt, Artificial Sequence
  Chemically synthesized
cacacaguucuugguggugua

SEQ ID NO: 73010 - RNA, 21 nt, Artificial Sequence
  Chemically synthesized
cucauccagaucaucccggaa

SEQ ID NO: 73011 - RNA, 23 nt, Artificial Sequence
  Chemically synthesized
gaaucugcuuugucuucuacucg

SEQ ID NO: 73012 - RNA, 23 nt, Artificial Sequence
  Chemically synthesized
ucaggacccggaaugacaacagc

SEQ ID NO: 73013 - RNA, 23 nt, Artificial Sequence
  Chemically synthesized
gucaggacccggaaugacaacag

SEQ ID NO: 73014 - RNA, 23 nt, Artificial Sequence
  Chemically synthesized
ggucaggacccggaaugacaaca

SEQ ID NO: 73015 - RNA, 23 nt, Artificial Sequence
  Chemically synthesized
uggucaggacccggaaugacaac

SEQ ID NO: 73016 - RNA, 23 nt, Artificial Sequence
  Chemically synthesized
guggucaggacccggaaugacaa

SEQ ID NO: 73017 - RNA, 23 nt, Artificial Sequence
  Chemically synthesized
gaaucugcuggacacgcuaccuc

SEQ ID NO: 73018 - RNA, 23 nt, Artificial Sequence
  Chemically synthesized
aggagaugcuucagaggauucgg

SEQ ID NO: 73019 - RNA, 23 nt, Artificial Sequence
  Chemically synthesized
caggagaugcuucagaggauucg

SEQ ID NO: 73020 - RNA, 23 nt, Artificial Sequence
  Chemically synthesized
gcaggagaugcuucagaggauuc

SEQ ID NO: 73021 - RNA, 23 nt, Artificial Sequence
  Chemically synthesized
cgcaggagaugcuucagaggauu

SEQ ID NO: 73022 - RNA, 23 nt, Artificial Sequence
  Chemically synthesized
ccgcaggagaugcuucagaggau

SEQ ID NO: 73023 - RNA, 23 nt, Artificial Sequence
  Chemically synthesized
caccuuccucacagugacacaca

SEQ ID NO: 73024 - RNA, 23 nt, Artificial Sequence
  Chemically synthesized
ucaccuuccucacagugacacac

SEQ ID NO: 73025 - RNA, 23 nt, Artificial Sequence
  Chemically synthesized
cucaccuuccucacagugacaca

SEQ ID NO: 73026 - RNA, 23 nt, Artificial Sequence
  Chemically synthesized
ggagaugcuucagaggauucgga

SEQ ID NO: 73027 - RNA, 23 nt, Artificial Sequence
  Chemically synthesized
aguucuuugcggccuucgagcgc

SEQ ID NO: 73028 - RNA, 23 nt, Artificial Sequence
  Chemically synthesized
gaguucuuugcggccuucgagcg

SEQ ID NO: 73029 - RNA, 23 nt, Artificial Sequence
  Chemically synthesized
agaccuaccuggaggaagaggca

SEQ ID NO: 73030 - RNA, 23 nt, Artificial Sequence
  Chemically synthesized
gagaccuaccuggaggaagaggc

SEQ ID NO: 73031 - RNA, 23 nt, Artificial Sequence
  Chemically synthesized
ggagaccuaccuggaggaagagg

SEQ ID NO: 73032 - RNA, 23 nt, Artificial Sequence
  Chemically synthesized
uggagaccuaccuggaggaagag

SEQ ID NO: 73033 - RNA, 23 nt, Artificial Sequence
  Chemically synthesized
cuggagaccuaccuggaggaaga

SEQ ID NO: 73034 - RNA, 23 nt, Artificial Sequence
  Chemically synthesized
ccaccuucaagucucuccagugu

SEQ ID NO: 73035 - RNA, 23 nt, Artificial Sequence
  Chemically synthesized
cccaccuucaagucucuccagug

SEQ ID NO: 73036 - RNA, 23 nt, Artificial Sequence
  Chemically synthesized
ccccaccuucaagucucuccagu

SEQ ID NO: 73037 - RNA, 23 nt, Artificial Sequence
  Chemically synthesized
cccccaccuucaagucucuccag

SEQ ID NO: 73038 - RNA, 23 nt, Artificial Sequence
  Chemically synthesized
gcccccaccuucaagucucucca

SEQ ID NO: 73039 - RNA, 23 nt, Artificial Sequence
  Chemically synthesized
cagcgccucgaucucucucagaa

SEQ ID NO: 73040 - RNA, 23 nt, Artificial Sequence
  Chemically synthesized
cuuuuaggcuggcccagauauuc

SEQ ID NO: 73041 - RNA, 23 nt, Artificial Sequence
  Chemically synthesized
acuuuuaggcuggcccagauauu

SEQ ID NO: 73042 - RNA, 23 nt, Artificial Sequence
  Chemically synthesized
gacuuuuaggcuggcccagauau

SEQ ID NO: 73043 - RNA, 23 nt, Artificial Sequence
  Chemically synthesized
agacuuuuaggcuggcccagaua

SEQ ID NO: 73044 - RNA, 23 nt, Artificial Sequence
  Chemically synthesized
cagacuuuuaggcuggcccagau

SEQ ID NO: 73045 - RNA, 23 nt, Artificial Sequence
  Chemically synthesized
cucugacacgguggagauguucg

SEQ ID NO: 73046 - RNA, 23 nt, Artificial Sequence
  Chemically synthesized
ccucugacacgguggagauguuc

SEQ ID NO: 73047 - RNA, 23 nt, Artificial Sequence
  Chemically synthesized
cccucugacacgguggagauguu

SEQ ID NO: 73048 - RNA, 23 nt, Artificial Sequence
  Chemically synthesized
gcaaguaccaggacagcauccga

SEQ ID NO: 73049 - RNA, 23 nt, Artificial Sequence
  Chemically synthesized
cgcaaguaccaggacagcauccg

SEQ ID NO: 73050 - RNA, 23 nt, Artificial Sequence
  Chemically synthesized
ccgcaaguaccaggacagcaucc

SEQ ID NO: 73051 - RNA, 23 nt, Artificial Sequence
  Chemically synthesized
gccgcaaguaccaggacagcauc

SEQ ID NO: 73052 - RNA, 23 nt, Artificial Sequence
  Chemically synthesized
cgccgcaaguaccaggacagcau

SEQ ID NO: 73053 - RNA, 23 nt, Artificial Sequence
  Chemically synthesized
gccgcaggagaugcuucagagga

SEQ ID NO: 73054 - RNA, 23 nt, Artificial Sequence
  Chemically synthesized
uccuuguccugcacagcaaccuc

SEQ ID NO: 73055 - RNA, 23 nt, Artificial Sequence
  Chemically synthesized
cuccuuguccugcacagcaaccu

SEQ ID NO: 73056 - RNA, 23 nt, Artificial Sequence
  Chemically synthesized
gcuccuuguccugcacagcaacc

SEQ ID NO: 73057 - RNA, 23 nt, Artificial Sequence
  Chemically synthesized
ggcuccuuguccugcacagcaac

SEQ ID NO: 73058 - RNA, 23 nt, Artificial Sequence
  Chemically synthesized
cggcuccuuguccugcacagcaa

SEQ ID NO: 73059 - RNA, 23 nt, Artificial Sequence
  Chemically synthesized
cagaaaugcccagacuguuccug

SEQ ID NO: 73060 - RNA, 23 nt, Artificial Sequence
  Chemically synthesized
ccagaaaugcccagacuguuccu

SEQ ID NO: 73061 - RNA, 23 nt, Artificial Sequence
  Chemically synthesized
uccagaaaugcccagacuguucc

SEQ ID NO: 73062 - RNA, 23 nt, Artificial Sequence
  Chemically synthesized
uuccagaaaugcccagacuguuc

SEQ ID NO: 73063 - RNA, 23 nt, Artificial Sequence
  Chemically synthesized
auuccagaaaugcccagacuguu

SEQ ID NO: 73064 - RNA, 23 nt, Artificial Sequence
  Chemically synthesized
cgaguuccgggaugaucuggaug

SEQ ID NO: 73065 - RNA, 23 nt, Artificial Sequence
  Chemically synthesized
acgaguuccgggaugaucuggau

SEQ ID NO: 73066 - RNA, 23 nt, Artificial Sequence
  Chemically synthesized
ggccucuccuuggcacccuugaa

SEQ ID NO: 73067 - RNA, 23 nt, Artificial Sequence
  Chemically synthesized
ucaacagccuggagacacugccg

SEQ ID NO: 73068 - RNA, 23 nt, Artificial Sequence
  Chemically synthesized
uucaacagccuggagacacugcc

SEQ ID NO: 73069 - RNA, 23 nt, Artificial Sequence
  Chemically synthesized
cuucaacagccuggagacacugc

SEQ ID NO: 73070 - RNA, 23 nt, Artificial Sequence
  Chemically synthesized
gcuucaacagccuggagacacug

SEQ ID NO: 73071 - RNA, 23 nt, Artificial Sequence
  Chemically synthesized
agcuucaacagccuggagacacu

SEQ ID NO: 73072 - RNA, 23 nt, Artificial Sequence
  Chemically synthesized
cacgaguuccgggaugaucugga

SEQ ID NO: 73073 - RNA, 23 nt, Artificial Sequence
  Chemically synthesized
gcacgaguuccgggaugaucugg

SEQ ID NO: 73074 - RNA, 23 nt, Artificial Sequence
  Chemically synthesized
ggcacgaguuccgggaugaucug

SEQ ID NO: 73075 - RNA, 23 nt, Artificial Sequence
  Chemically synthesized
cggcacgaguuccgggaugaucu

SEQ ID NO: 73076 - RNA, 23 nt, Artificial Sequence
  Chemically synthesized
caccaagaacugugugggaggcc

SEQ ID NO: 73077 - RNA, 23 nt, Artificial Sequence
  Chemically synthesized
ccaccaagaacugugugggaggc

SEQ ID NO: 73078 - RNA, 23 nt, Artificial Sequence
  Chemically synthesized
accaccaagaacugugugggagg

SEQ ID NO: 73079 - RNA, 23 nt, Artificial Sequence
  Chemically synthesized
caccaccaagaacugugugggag

SEQ ID NO: 73080 - RNA, 23 nt, Artificial Sequence
  Chemically synthesized
ccuuggcacccuugaaucuggga

SEQ ID NO: 73081 - RNA, 23 nt, Artificial Sequence
  Chemically synthesized
uccuuggcacccuugaaucuggg

SEQ ID NO: 73082 - RNA, 23 nt, Artificial Sequence
  Chemically synthesized
cauuccagaaaugcccagacugu

SEQ ID NO: 73083 - RNA, 23 nt, Artificial Sequence
  Chemically synthesized
gucucacaacugccucucugagc

SEQ ID NO: 73084 - RNA, 23 nt, Artificial Sequence
  Chemically synthesized
ugucucacaacugccucucugag

SEQ ID NO: 73085 - RNA, 23 nt, Artificial Sequence
  Chemically synthesized
cugucucacaacugccucucuga

SEQ ID NO: 73086 - RNA, 23 nt, Artificial Sequence
  Chemically synthesized
ucaagucucuccagugugugggg

SEQ ID NO: 73087 - RNA, 23 nt, Artificial Sequence
  Chemically synthesized
uucaagucucuccaguguguggg

SEQ ID NO: 73088 - RNA, 23 nt, Artificial Sequence
  Chemically synthesized
cuucaagucucuccagugugugg

SEQ ID NO: 73089 - RNA, 23 nt, Artificial Sequence
  Chemically synthesized
ccuucaagucucuccagugugug

SEQ ID NO: 73090 - RNA, 23 nt, Artificial Sequence
  Chemically synthesized
accuucaagucucuccagugugu

SEQ ID NO: 73091 - RNA, 23 nt, Artificial Sequence
  Chemically synthesized
acagacuuuuaggcuggcccaga

SEQ ID NO: 73092 - RNA, 23 nt, Artificial Sequence
  Chemically synthesized
cacagacuuuuaggcuggcccag

SEQ ID NO: 73093 - RNA, 23 nt, Artificial Sequence
  Chemically synthesized
ccacagacuuuuaggcuggccca

SEQ ID NO: 73094 - RNA, 23 nt, Artificial Sequence
  Chemically synthesized
aguggcagcccucauuccagaaa

SEQ ID NO: 73095 - RNA, 23 nt, Artificial Sequence
  Chemically synthesized
gauguucgagggcgaagaguucu

SEQ ID NO: 73096 - RNA, 23 nt, Artificial Sequence
  Chemically synthesized
ugagcagauccgucacaugcucu

SEQ ID NO: 73097 - RNA, 23 nt, Artificial Sequence
  Chemically synthesized
augagcagauccgucacaugcuc

SEQ ID NO: 73098 - RNA, 23 nt, Artificial Sequence
  Chemically synthesized
gaugagcagauccgucacaugcu

SEQ ID NO: 73099 - RNA, 23 nt, Artificial Sequence
  Chemically synthesized
ggaugagcagauccgucacaugc

SEQ ID NO: 73100 - RNA, 23 nt, Artificial Sequence
  Chemically synthesized
uggaugagcagauccgucacaug

SEQ ID NO: 73101 - RNA, 23 nt, Artificial Sequence
  Chemically synthesized
ccucaccuuccucacagugacac

SEQ ID NO: 73102 - RNA, 23 nt, Artificial Sequence
  Chemically synthesized
cccucaccuuccucacagugaca

SEQ ID NO: 73103 - RNA, 23 nt, Artificial Sequence
  Chemically synthesized
caccuucaagucucuccagugug

SEQ ID NO: 73104 - RNA, 23 nt, Artificial Sequence
  Chemically synthesized
uuuuaggcuggcccagauauucc

SEQ ID NO: 73105 - RNA, 23 nt, Artificial Sequence
  Chemically synthesized
ugaaucugggagaugccgagacc

SEQ ID NO: 73106 - RNA, 23 nt, Artificial Sequence
  Chemically synthesized
uugaaucugggagaugccgagac

SEQ ID NO: 73107 - RNA, 23 nt, Artificial Sequence
  Chemically synthesized
cuugaaucugggagaugccgaga

SEQ ID NO: 73108 - RNA, 23 nt, Artificial Sequence
  Chemically synthesized
ccuugaaucugggagaugccgag

SEQ ID NO: 73109 - RNA, 23 nt, Artificial Sequence
  Chemically synthesized
uguguggagggcagaaucugcuu

SEQ ID NO: 73110 - RNA, 23 nt, Artificial Sequence
  Chemically synthesized
caucaagcugccgagacuucgag

SEQ ID NO: 73111 - RNA, 23 nt, Artificial Sequence
  Chemically synthesized
ccaucaagcugccgagacuucga

SEQ ID NO: 73112 - RNA, 23 nt, Artificial Sequence
  Chemically synthesized
cccaucaagcugccgagacuucg

SEQ ID NO: 73113 - RNA, 23 nt, Artificial Sequence
  Chemically synthesized
gcccaucaagcugccgagacuuc

SEQ ID NO: 73114 - RNA, 23 nt, Artificial Sequence
  Chemically synthesized
ugcccaucaagcugccgagacuu

SEQ ID NO: 73115 - RNA, 23 nt, Artificial Sequence
  Chemically synthesized
gagggcgaagaguucuuugcggc

SEQ ID NO: 73116 - RNA, 23 nt, Artificial Sequence
  Chemically synthesized
cucauuccagaaaugcccagacu

SEQ ID NO: 73117 - RNA, 23 nt, Artificial Sequence
  Chemically synthesized
ccucauuccagaaaugcccagac

SEQ ID NO: 73118 - RNA, 23 nt, Artificial Sequence
  Chemically synthesized
cccucauuccagaaaugcccaga

SEQ ID NO: 73119 - RNA, 23 nt, Artificial Sequence
  Chemically synthesized
gcccucauuccagaaaugcccag

SEQ ID NO: 73120 - RNA, 23 nt, Artificial Sequence
  Chemically synthesized
ccucacagugacacacaaccgcc

SEQ ID NO: 73121 - RNA, 23 nt, Artificial Sequence
  Chemically synthesized
caaguaccaggacagcauccgac

SEQ ID NO: 73122 - RNA, 23 nt, Artificial Sequence
  Chemically synthesized
uacuggcucugguacaccaccaa

SEQ ID NO: 73123 - RNA, 23 nt, Artificial Sequence
  Chemically synthesized
guacuggcucugguacaccacca

SEQ ID NO: 73124 - RNA, 23 nt, Artificial Sequence
  Chemically synthesized
uguacuggcucugguacaccacc

SEQ ID NO: 73125 - RNA, 23 nt, Artificial Sequence
  Chemically synthesized
cuguacuggcucugguacaccac

SEQ ID NO: 73126 - RNA, 23 nt, Artificial Sequence
  Chemically synthesized
ccuguacuggcucugguacacca

SEQ ID NO: 73127 - RNA, 23 nt, Artificial Sequence
  Chemically synthesized
augcuucagaggauucggacgca

SEQ ID NO: 73128 - RNA, 23 nt, Artificial Sequence
  Chemically synthesized
gaugcuucagaggauucggacgc

SEQ ID NO: 73129 - RNA, 23 nt, Artificial Sequence
  Chemically synthesized
agaugcuucagaggauucggacg

SEQ ID NO: 73130 - RNA, 23 nt, Artificial Sequence
  Chemically synthesized
gagaugcuucagaggauucggac

SEQ ID NO: 73131 - RNA, 23 nt, Artificial Sequence
  Chemically synthesized
ucuugcgucugagcacucacgag

SEQ ID NO: 73132 - RNA, 23 nt, Artificial Sequence
  Chemically synthesized
uucuugcgucugagcacucacga

SEQ ID NO: 73133 - RNA, 23 nt, Artificial Sequence
  Chemically synthesized
auucuugcgucugagcacucacg

SEQ ID NO: 73134 - RNA, 23 nt, Artificial Sequence
  Chemically synthesized
aauucuugcgucugagcacucac

SEQ ID NO: 73135 - RNA, 23 nt, Artificial Sequence
  Chemically synthesized
gaauucuugcgucugagcacuca

SEQ ID NO: 73136 - RNA, 23 nt, Artificial Sequence
  Chemically synthesized
gcccagacuguuccugaccucag

SEQ ID NO: 73137 - RNA, 23 nt, Artificial Sequence
  Chemically synthesized
ugcccagacuguuccugaccuca

SEQ ID NO: 73138 - RNA, 23 nt, Artificial Sequence
  Chemically synthesized
cuguguggagggcagaaucugcu

SEQ ID NO: 73139 - RNA, 23 nt, Artificial Sequence
  Chemically synthesized
ucuggaugagcagauccgucaca

SEQ ID NO: 73140 - RNA, 23 nt, Artificial Sequence
  Chemically synthesized
aucuggaugagcagauccgucac

SEQ ID NO: 73141 - RNA, 23 nt, Artificial Sequence
  Chemically synthesized
gaucuggaugagcagauccguca

SEQ ID NO: 73142 - RNA, 23 nt, Artificial Sequence
  Chemically synthesized
acaucacagcucaggugguccug

SEQ ID NO: 73143 - RNA, 23 nt, Artificial Sequence
  Chemically synthesized
gacaucacagcucaggugguccu

SEQ ID NO: 73144 - RNA, 23 nt, Artificial Sequence
  Chemically synthesized
gcugucucacaacugccucucug

SEQ ID NO: 73145 - RNA, 23 nt, Artificial Sequence
  Chemically synthesized
ugcugucucacaacugccucucu

SEQ ID NO: 73146 - RNA, 23 nt, Artificial Sequence
  Chemically synthesized
ggaauucuugcgucugagcacuc

SEQ ID NO: 73147 - RNA, 23 nt, Artificial Sequence
  Chemically synthesized
acccggaaugacaacagcugggg

SEQ ID NO: 73148 - RNA, 23 nt, Artificial Sequence
  Chemically synthesized
gacccggaaugacaacagcuggg

SEQ ID NO: 73149 - RNA, 23 nt, Artificial Sequence
  Chemically synthesized
ggacccggaaugacaacagcugg

SEQ ID NO: 73150 - RNA, 23 nt, Artificial Sequence
  Chemically synthesized
aggacccggaaugacaacagcug

SEQ ID NO: 73151 - RNA, 23 nt, Artificial Sequence
  Chemically synthesized
caggacccggaaugacaacagcu

SEQ ID NO: 73152 - RNA, 23 nt, Artificial Sequence
  Chemically synthesized
uucagaggauucggacgcagggu

SEQ ID NO: 73153 - RNA, 23 nt, Artificial Sequence
  Chemically synthesized
cuucagaggauucggacgcaggg

SEQ ID NO: 73154 - RNA, 23 nt, Artificial Sequence
  Chemically synthesized
gcuucagaggauucggacgcagg

SEQ ID NO: 73155 - RNA, 23 nt, Artificial Sequence
  Chemically synthesized
ugcuucagaggauucggacgcag

SEQ ID NO: 73156 - RNA, 23 nt, Artificial Sequence
  Chemically synthesized
cuggaugagcagauccgucacau

SEQ ID NO: 73157 - RNA, 23 nt, Artificial Sequence
  Chemically synthesized
cuuucugacgcagagcaaccugc

SEQ ID NO: 73158 - RNA, 23 nt, Artificial Sequence
  Chemically synthesized
uugcugucucacaacugccucuc

SEQ ID NO: 73159 - RNA, 23 nt, Artificial Sequence
  Chemically synthesized
cuugcugucucacaacugccucu

SEQ ID NO: 73160 - RNA, 23 nt, Artificial Sequence
  Chemically synthesized
uuuaggcuggcccagauauuccc

SEQ ID NO: 73161 - RNA, 23 nt, Artificial Sequence
  Chemically synthesized
gagcuucaacagccuggagacac

SEQ ID NO: 73162 - RNA, 23 nt, Artificial Sequence
  Chemically synthesized
ucauuccagaaaugcccagacug

SEQ ID NO: 73163 - RNA, 23 nt, Artificial Sequence
  Chemically synthesized
gcccucaccuuccucacagugac

SEQ ID NO: 73164 - RNA, 23 nt, Artificial Sequence
  Chemically synthesized
agauuuggacagcuuuccuguga

SEQ ID NO: 73165 - RNA, 23 nt, Artificial Sequence
  Chemically synthesized
cagauuuggacagcuuuccugug

SEQ ID NO: 73166 - RNA, 23 nt, Artificial Sequence
  Chemically synthesized
ucagauuuggacagcuuuccugu

SEQ ID NO: 73167 - RNA, 23 nt, Artificial Sequence
  Chemically synthesized
cgcccucaccuuccucacaguga

SEQ ID NO: 73168 - RNA, 23 nt, Artificial Sequence
  Chemically synthesized
ucuugcugucucacaacugccuc

SEQ ID NO: 73169 - RNA, 23 nt, Artificial Sequence
  Chemically synthesized
uuaggcuggcccagauauucccc

SEQ ID NO: 73170 - RNA, 23 nt, Artificial Sequence
  Chemically synthesized
aaaugcccagacuguuccugacc

SEQ ID NO: 73171 - RNA, 23 nt, Artificial Sequence
  Chemically synthesized
gaaaugcccagacuguuccugac

SEQ ID NO: 73172 - RNA, 23 nt, Artificial Sequence
  Chemically synthesized
agaaaugcccagacuguuccuga

SEQ ID NO: 73173 - RNA, 23 nt, Artificial Sequence
  Chemically synthesized
augcccagacuguuccugaccuc

SEQ ID NO: 73174 - RNA, 23 nt, Artificial Sequence
  Chemically synthesized
aaugcccagacuguuccugaccu

SEQ ID NO: 73175 - RNA, 23 nt, Artificial Sequence
  Chemically synthesized
cuaccuccugagauuggaggccu

SEQ ID NO: 73176 - RNA, 23 nt, Artificial Sequence
  Chemically synthesized
cccacagacuuuuaggcuggccc

SEQ ID NO: 73177 - RNA, 23 nt, Artificial Sequence
  Chemically synthesized
ccccacagacuuuuaggcuggcc

SEQ ID NO: 73178 - RNA, 23 nt, Artificial Sequence
  Chemically synthesized
gccccacagacuuuuaggcuggc

SEQ ID NO: 73179 - RNA, 23 nt, Artificial Sequence
  Chemically synthesized
ggccccacagacuuuuaggcugg

SEQ ID NO: 73180 - RNA, 23 nt, Artificial Sequence
  Chemically synthesized
aggccccacagacuuuuaggcug

SEQ ID NO: 73181 - RNA, 23 nt, Artificial Sequence
  Chemically synthesized
aaucugcuuugucuucuacucgc

SEQ ID NO: 73182 - RNA, 23 nt, Artificial Sequence
  Chemically synthesized
gaucucucucagaaucugcugga

SEQ ID NO: 73183 - RNA, 23 nt, Artificial Sequence
  Chemically synthesized
ugccccacuucuccugguuccuu

SEQ ID NO: 73184 - RNA, 23 nt, Artificial Sequence
  Chemically synthesized
cucacagugacacacaaccgccu

SEQ ID NO: 73185 - RNA, 23 nt, Artificial Sequence
  Chemically synthesized
caagucucuccagugugugggga

SEQ ID NO: 73186 - RNA, 23 nt, Artificial Sequence
  Chemically synthesized
aaucugggagaugccgagaccgg

SEQ ID NO: 73187 - RNA, 23 nt, Artificial Sequence
  Chemically synthesized
gaaucugggagaugccgagaccg

SEQ ID NO: 73188 - RNA, 23 nt, Artificial Sequence
  Chemically synthesized
gcccucugacacgguggagaugu

SEQ ID NO: 73189 - RNA, 23 nt, Artificial Sequence
  Chemically synthesized
ucacaugcucuucuccugggcug

SEQ ID NO: 73190 - RNA, 23 nt, Artificial Sequence
  Chemically synthesized
cuuggcacccuugaaucugggag

SEQ ID NO: 73191 - RNA, 23 nt, Artificial Sequence
  Chemically synthesized
aaucugcuggacacgcuaccucc

SEQ ID NO: 73192 - RNA, 23 nt, Artificial Sequence
  Chemically synthesized
aagucucuccaguguguggggac

SEQ ID NO: 73193 - RNA, 23 nt, Artificial Sequence
  Chemically synthesized
agggcgaagaguucuuugcggcc

SEQ ID NO: 73194 - RNA, 23 nt, Artificial Sequence
  Chemically synthesized
uaggcuggcccagauauucccca

SEQ ID NO: 73195 - RNA, 23 nt, Artificial Sequence
  Chemically synthesized
ucacagugacacacaaccgccug

SEQ ID NO: 73196 - RNA, 23 nt, Artificial Sequence
  Chemically synthesized
accaagaacugugugggaggccu

SEQ ID NO: 73197 - RNA, 23 nt, Artificial Sequence
  Chemically synthesized
uuguccugcacagcaaccuccug

SEQ ID NO: 73198 - RNA, 23 nt, Artificial Sequence
  Chemically synthesized
cuuguccugcacagcaaccuccu

SEQ ID NO: 73199 - RNA, 23 nt, Artificial Sequence
  Chemically synthesized
ccuuguccugcacagcaaccucc

SEQ ID NO: 73200 - RNA, 23 nt, Artificial Sequence
  Chemically synthesized
uucugacgcagagcaaccugcug

SEQ ID NO: 73201 - RNA, 23 nt, Artificial Sequence
  Chemically synthesized
uuucugacgcagagcaaccugcu

SEQ ID NO: 73202 - RNA, 23 nt, Artificial Sequence
  Chemically synthesized
aucaagcugccgagacuucgagg

SEQ ID NO: 73203 - RNA, 23 nt, Artificial Sequence
  Chemically synthesized
cugguuccuugugguuucccgcc

SEQ ID NO: 73204 - RNA, 23 nt, Artificial Sequence
  Chemically synthesized
aaguaccaggacagcauccgacg

SEQ ID NO: 73205 - RNA, 23 nt, Artificial Sequence
  Chemically synthesized
uaccuccugagauuggaggccug

SEQ ID NO: 73206 - RNA, 23 nt, Artificial Sequence
  Chemically synthesized
ugguuccuugugguuucccgccc

SEQ ID NO: 73207 - RNA, 23 nt, Artificial Sequence
  Chemically synthesized
cgaguagaagacaaagcagauuc

SEQ ID NO: 73208 - RNA, 23 nt, Artificial Sequence
  Chemically synthesized
gcuguugucauuccggguccuga

SEQ ID NO: 73209 - RNA, 23 nt, Artificial Sequence
  Chemically synthesized
cuguugucauuccggguccugac

SEQ ID NO: 73210 - RNA, 23 nt, Artificial Sequence
  Chemically synthesized
uguugucauuccggguccugacc

SEQ ID NO: 73211 - RNA, 23 nt, Artificial Sequence
  Chemically synthesized
guugucauuccggguccugacca

SEQ ID NO: 73212 - RNA, 23 nt, Artificial Sequence
  Chemically synthesized
uugucauuccggguccugaccac

SEQ ID NO: 73213 - RNA, 23 nt, Artificial Sequence
  Chemically synthesized
gagguagcguguccagcagauuc

SEQ ID NO: 73214 - RNA, 23 nt, Artificial Sequence
  Chemically synthesized
ccgaauccucugaagcaucuccu

SEQ ID NO: 73215 - RNA, 23 nt, Artificial Sequence
  Chemically synthesized
cgaauccucugaagcaucuccug

SEQ ID NO: 73216 - RNA, 23 nt, Artificial Sequence
  Chemically synthesized
gaauccucugaagcaucuccugc

SEQ ID NO: 73217 - RNA, 23 nt, Artificial Sequence
  Chemically synthesized
aauccucugaagcaucuccugcg

SEQ ID NO: 73218 - RNA, 23 nt, Artificial Sequence
  Chemically synthesized
auccucugaagcaucuccugcgg

SEQ ID NO: 73219 - RNA, 23 nt, Artificial Sequence
  Chemically synthesized
ugugugucacugugaggaaggug

SEQ ID NO: 73220 - RNA, 23 nt, Artificial Sequence
  Chemically synthesized
gugugucacugugaggaagguga

SEQ ID NO: 73221 - RNA, 23 nt, Artificial Sequence
  Chemically synthesized
ugugucacugugaggaaggugag

SEQ ID NO: 73222 - RNA, 23 nt, Artificial Sequence
  Chemically synthesized
uccgaauccucugaagcaucucc

SEQ ID NO: 73223 - RNA, 23 nt, Artificial Sequence
  Chemically synthesized
gcgcucgaaggccgcaaagaacu

SEQ ID NO: 73224 - RNA, 23 nt, Artificial Sequence
  Chemically synthesized
cgcucgaaggccgcaaagaacuc

SEQ ID NO: 73225 - RNA, 23 nt, Artificial Sequence
  Chemically synthesized
ugccucuuccuccagguaggucu

SEQ ID NO: 73226 - RNA, 23 nt, Artificial Sequence
  Chemically synthesized
gccucuuccuccagguaggucuc

SEQ ID NO: 73227 - RNA, 23 nt, Artificial Sequence
  Chemically synthesized
ccucuuccuccagguaggucucc

SEQ ID NO: 73228 - RNA, 23 nt, Artificial Sequence
  Chemically synthesized
cucuuccuccagguaggucucca

SEQ ID NO: 73229 - RNA, 23 nt, Artificial Sequence
  Chemically synthesized
ucuuccuccagguaggucuccag

SEQ ID NO: 73230 - RNA, 23 nt, Artificial Sequence
  Chemically synthesized
acacuggagagacuugaaggugg

SEQ ID NO: 73231 - RNA, 23 nt, Artificial Sequence
  Chemically synthesized
cacuggagagacuugaagguggg

SEQ ID NO: 73232 - RNA, 23 nt, Artificial Sequence
  Chemically synthesized
acuggagagacuugaaggugggg

SEQ ID NO: 73233 - RNA, 23 nt, Artificial Sequence
  Chemically synthesized
cuggagagacuugaagguggggg

SEQ ID NO: 73234 - RNA, 23 nt, Artificial Sequence
  Chemically synthesized
uggagagacuugaaggugggggc

SEQ ID NO: 73235 - RNA, 23 nt, Artificial Sequence
  Chemically synthesized
uucugagagagaucgaggcgcug

SEQ ID NO: 73236 - RNA, 23 nt, Artificial Sequence
  Chemically synthesized
gaauaucugggccagccuaaaag

SEQ ID NO: 73237 - RNA, 23 nt, Artificial Sequence
  Chemically synthesized
aauaucugggccagccuaaaagu

SEQ ID NO: 73238 - RNA, 23 nt, Artificial Sequence
  Chemically synthesized
auaucugggccagccuaaaaguc

SEQ ID NO: 73239 - RNA, 23 nt, Artificial Sequence
  Chemically synthesized
uaucugggccagccuaaaagucu

SEQ ID NO: 73240 - RNA, 23 nt, Artificial Sequence
  Chemically synthesized
aucugggccagccuaaaagucug

SEQ ID NO: 73241 - RNA, 23 nt, Artificial Sequence
  Chemically synthesized
cgaacaucuccaccgugucagag

SEQ ID NO: 73242 - RNA, 23 nt, Artificial Sequence
  Chemically synthesized
gaacaucuccaccgugucagagg

SEQ ID NO: 73243 - RNA, 23 nt, Artificial Sequence
  Chemically synthesized
aacaucuccaccgugucagaggg

SEQ ID NO: 73244 - RNA, 23 nt, Artificial Sequence
  Chemically synthesized
ucggaugcuguccugguacuugc

SEQ ID NO: 73245 - RNA, 23 nt, Artificial Sequence
  Chemically synthesized
cggaugcuguccugguacuugcg

SEQ ID NO: 73246 - RNA, 23 nt, Artificial Sequence
  Chemically synthesized
ggaugcuguccugguacuugcgg

SEQ ID NO: 73247 - RNA, 23 nt, Artificial Sequence
  Chemically synthesized
gaugcuguccugguacuugcggc

SEQ ID NO: 73248 - RNA, 23 nt, Artificial Sequence
  Chemically synthesized
augcuguccugguacuugcggcg

SEQ ID NO: 73249 - RNA, 23 nt, Artificial Sequence
  Chemically synthesized
uccucugaagcaucuccugcggc

SEQ ID NO: 73250 - RNA, 23 nt, Artificial Sequence
  Chemically synthesized
gagguugcugugcaggacaagga

SEQ ID NO: 73251 - RNA, 23 nt, Artificial Sequence
  Chemically synthesized
agguugcugugcaggacaaggag

SEQ ID NO: 73252 - RNA, 23 nt, Artificial Sequence
  Chemically synthesized
gguugcugugcaggacaaggagc

SEQ ID NO: 73253 - RNA, 23 nt, Artificial Sequence
  Chemically synthesized
guugcugugcaggacaaggagcc

SEQ ID NO: 73254 - RNA, 23 nt, Artificial Sequence
  Chemically synthesized
uugcugugcaggacaaggagccg

SEQ ID NO: 73255 - RNA, 23 nt, Artificial Sequence
  Chemically synthesized
caggaacagucugggcauuucug

SEQ ID NO: 73256 - RNA, 23 nt, Artificial Sequence
  Chemically synthesized
aggaacagucugggcauuucugg

SEQ ID NO: 73257 - RNA, 23 nt, Artificial Sequence
  Chemically synthesized
ggaacagucugggcauuucugga

SEQ ID NO: 73258 - RNA, 23 nt, Artificial Sequence
  Chemically synthesized
gaacagucugggcauuucuggaa

SEQ ID NO: 73259 - RNA, 23 nt, Artificial Sequence
  Chemically synthesized
aacagucugggcauuucuggaau

SEQ ID NO: 73260 - RNA, 23 nt, Artificial Sequence
  Chemically synthesized
cauccagaucaucccggaacucg

SEQ ID NO: 73261 - RNA, 23 nt, Artificial Sequence
  Chemically synthesized
auccagaucaucccggaacucgu

SEQ ID NO: 73262 - RNA, 23 nt, Artificial Sequence
  Chemically synthesized
uucaagggugccaaggagaggcc

SEQ ID NO: 73263 - RNA, 23 nt, Artificial Sequence
  Chemically synthesized
cggcagugucuccaggcuguuga

SEQ ID NO: 73264 - RNA, 23 nt, Artificial Sequence
  Chemically synthesized
ggcagugucuccaggcuguugaa

SEQ ID NO: 73265 - RNA, 23 nt, Artificial Sequence
  Chemically synthesized
gcagugucuccaggcuguugaag

SEQ ID NO: 73266 - RNA, 23 nt, Artificial Sequence
  Chemically synthesized
cagugucuccaggcuguugaagc

SEQ ID NO: 73267 - RNA, 23 nt, Artificial Sequence
  Chemically synthesized
agugucuccaggcuguugaagcu

SEQ ID NO: 73268 - RNA, 23 nt, Artificial Sequence
  Chemically synthesized
uccagaucaucccggaacucgug

SEQ ID NO: 73269 - RNA, 23 nt, Artificial Sequence
  Chemically synthesized
ccagaucaucccggaacucgugc

SEQ ID NO: 73270 - RNA, 23 nt, Artificial Sequence
  Chemically synthesized
cagaucaucccggaacucgugcc

SEQ ID NO: 73271 - RNA, 23 nt, Artificial Sequence
  Chemically synthesized
agaucaucccggaacucgugccg

SEQ ID NO: 73272 - RNA, 23 nt, Artificial Sequence
  Chemically synthesized
ggccucccacacaguucuuggug

SEQ ID NO: 73273 - RNA, 23 nt, Artificial Sequence
  Chemically synthesized
gccucccacacaguucuuggugg

SEQ ID NO: 73274 - RNA, 23 nt, Artificial Sequence
  Chemically synthesized
ccucccacacaguucuugguggu

SEQ ID NO: 73275 - RNA, 23 nt, Artificial Sequence
  Chemically synthesized
cucccacacaguucuugguggug

SEQ ID NO: 73276 - RNA, 23 nt, Artificial Sequence
  Chemically synthesized
ucccagauucaagggugccaagg

SEQ ID NO: 73277 - RNA, 23 nt, Artificial Sequence
  Chemically synthesized
cccagauucaagggugccaagga

SEQ ID NO: 73278 - RNA, 23 nt, Artificial Sequence
  Chemically synthesized
acagucugggcauuucuggaaug

SEQ ID NO: 73279 - RNA, 23 nt, Artificial Sequence
  Chemically synthesized
gcucagagaggcaguugugagac

SEQ ID NO: 73280 - RNA, 23 nt, Artificial Sequence
  Chemically synthesized
cucagagaggcaguugugagaca

SEQ ID NO: 73281 - RNA, 23 nt, Artificial Sequence
  Chemically synthesized
ucagagaggcaguugugagacag

SEQ ID NO: 73282 - RNA, 23 nt, Artificial Sequence
  Chemically synthesized
ccccacacacuggagagacuuga

SEQ ID NO: 73283 - RNA, 23 nt, Artificial Sequence
  Chemically synthesized
cccacacacuggagagacuugaa

SEQ ID NO: 73284 - RNA, 23 nt, Artificial Sequence
  Chemically synthesized
ccacacacuggagagacuugaag

SEQ ID NO: 73285 - RNA, 23 nt, Artificial Sequence
  Chemically synthesized
cacacacuggagagacuugaagg

SEQ ID NO: 73286 - RNA, 23 nt, Artificial Sequence
  Chemically synthesized
acacacuggagagacuugaaggu

SEQ ID NO: 73287 - RNA, 23 nt, Artificial Sequence
  Chemically synthesized
ucugggccagccuaaaagucugu

SEQ ID NO: 73288 - RNA, 23 nt, Artificial Sequence
  Chemically synthesized
cugggccagccuaaaagucugug

SEQ ID NO: 73289 - RNA, 23 nt, Artificial Sequence
  Chemically synthesized
ugggccagccuaaaagucugugg

SEQ ID NO: 73290 - RNA, 23 nt, Artificial Sequence
  Chemically synthesized
uuucuggaaugagggcugccacu

SEQ ID NO: 73291 - RNA, 23 nt, Artificial Sequence
  Chemically synthesized
agaacucuucgcccucgaacauc

SEQ ID NO: 73292 - RNA, 23 nt, Artificial Sequence
  Chemically synthesized
agagcaugugacggaucugcuca

SEQ ID NO: 73293 - RNA, 23 nt, Artificial Sequence
  Chemically synthesized
gagcaugugacggaucugcucau

SEQ ID NO: 73294 - RNA, 23 nt, Artificial Sequence
  Chemically synthesized
agcaugugacggaucugcucauc

SEQ ID NO: 73295 - RNA, 23 nt, Artificial Sequence
  Chemically synthesized
gcaugugacggaucugcucaucc

SEQ ID NO: 73296 - RNA, 23 nt, Artificial Sequence
  Chemically synthesized
caugugacggaucugcucaucca

SEQ ID NO: 73297 - RNA, 23 nt, Artificial Sequence
  Chemically synthesized
gugucacugugaggaaggugagg

SEQ ID NO: 73298 - RNA, 23 nt, Artificial Sequence
  Chemically synthesized
ugucacugugaggaaggugaggg

SEQ ID NO: 73299 - RNA, 23 nt, Artificial Sequence
  Chemically synthesized
cacacuggagagacuugaaggug

SEQ ID NO: 73300 - RNA, 23 nt, Artificial Sequence
  Chemically synthesized
ggaauaucugggccagccuaaaa

SEQ ID NO: 73301 - RNA, 23 nt, Artificial Sequence
  Chemically synthesized
ggucucggcaucucccagauuca

SEQ ID NO: 73302 - RNA, 23 nt, Artificial Sequence
  Chemically synthesized
gucucggcaucucccagauucaa

SEQ ID NO: 73303 - RNA, 23 nt, Artificial Sequence
  Chemically synthesized
ucucggcaucucccagauucaag

SEQ ID NO: 73304 - RNA, 23 nt, Artificial Sequence
  Chemically synthesized
cucggcaucucccagauucaagg

SEQ ID NO: 73305 - RNA, 23 nt, Artificial Sequence
  Chemically synthesized
aagcagauucugcccuccacaca

SEQ ID NO: 73306 - RNA, 23 nt, Artificial Sequence
  Chemically synthesized
cucgaagucucggcagcuugaug

SEQ ID NO: 73307 - RNA, 23 nt, Artificial Sequence
  Chemically synthesized
ucgaagucucggcagcuugaugg

SEQ ID NO: 73308 - RNA, 23 nt, Artificial Sequence
  Chemically synthesized
cgaagucucggcagcuugauggg

SEQ ID NO: 73309 - RNA, 23 nt, Artificial Sequence
  Chemically synthesized
gaagucucggcagcuugaugggc

SEQ ID NO: 73310 - RNA, 23 nt, Artificial Sequence
  Chemically synthesized
aagucucggcagcuugaugggca

SEQ ID NO: 73311 - RNA, 23 nt, Artificial Sequence
  Chemically synthesized
gccgcaaagaacucuucgcccuc

SEQ ID NO: 73312 - RNA, 23 nt, Artificial Sequence
  Chemically synthesized
agucugggcauuucuggaaugag

SEQ ID NO: 73313 - RNA, 23 nt, Artificial Sequence
  Chemically synthesized
gucugggcauuucuggaaugagg

SEQ ID NO: 73314 - RNA, 23 nt, Artificial Sequence
  Chemically synthesized
ucugggcauuucuggaaugaggg

SEQ ID NO: 73315 - RNA, 23 nt, Artificial Sequence
  Chemically synthesized
cugggcauuucuggaaugagggc

SEQ ID NO: 73316 - RNA, 23 nt, Artificial Sequence
  Chemically synthesized
ggcgguugugugucacugugagg

SEQ ID NO: 73317 - RNA, 23 nt, Artificial Sequence
  Chemically synthesized
gucggaugcuguccugguacuug

SEQ ID NO: 73318 - RNA, 23 nt, Artificial Sequence
  Chemically synthesized
uuggugguguaccagagccagua

SEQ ID NO: 73319 - RNA, 23 nt, Artificial Sequence
  Chemically synthesized
uggugguguaccagagccaguac

SEQ ID NO: 73320 - RNA, 23 nt, Artificial Sequence
  Chemically synthesized
ggugguguaccagagccaguaca

SEQ ID NO: 73321 - RNA, 23 nt, Artificial Sequence
  Chemically synthesized
gugguguaccagagccaguacag

SEQ ID NO: 73322 - RNA, 23 nt, Artificial Sequence
  Chemically synthesized
ugguguaccagagccaguacagg

SEQ ID NO: 73323 - RNA, 23 nt, Artificial Sequence
  Chemically synthesized
ugcguccgaauccucugaagcau

SEQ ID NO: 73324 - RNA, 23 nt, Artificial Sequence
  Chemically synthesized
gcguccgaauccucugaagcauc

SEQ ID NO: 73325 - RNA, 23 nt, Artificial Sequence
  Chemically synthesized
cguccgaauccucugaagcaucu

SEQ ID NO: 73326 - RNA, 23 nt, Artificial Sequence
  Chemically synthesized
guccgaauccucugaagcaucuc

SEQ ID NO: 73327 - RNA, 23 nt, Artificial Sequence
  Chemically synthesized
cucgugagugcucagacgcaaga

SEQ ID NO: 73328 - RNA, 23 nt, Artificial Sequence
  Chemically synthesized
ucgugagugcucagacgcaagaa

SEQ ID NO: 73329 - RNA, 23 nt, Artificial Sequence
  Chemically synthesized
cgugagugcucagacgcaagaau

SEQ ID NO: 73330 - RNA, 23 nt, Artificial Sequence
  Chemically synthesized
gugagugcucagacgcaagaauu

SEQ ID NO: 73331 - RNA, 23 nt, Artificial Sequence
  Chemically synthesized
ugagugcucagacgcaagaauuc

SEQ ID NO: 73332 - RNA, 23 nt, Artificial Sequence
  Chemically synthesized
cugaggucaggaacagucugggc

SEQ ID NO: 73333 - RNA, 23 nt, Artificial Sequence
  Chemically synthesized
ugaggucaggaacagucugggca

SEQ ID NO: 73334 - RNA, 23 nt, Artificial Sequence
  Chemically synthesized
agcagauucugcccuccacacag

SEQ ID NO: 73335 - RNA, 23 nt, Artificial Sequence
  Chemically synthesized
ugugacggaucugcucauccaga

SEQ ID NO: 73336 - RNA, 23 nt, Artificial Sequence
  Chemically synthesized
gugacggaucugcucauccagau

SEQ ID NO: 73337 - RNA, 23 nt, Artificial Sequence
  Chemically synthesized
ugacggaucugcucauccagauc

SEQ ID NO: 73338 - RNA, 23 nt, Artificial Sequence
  Chemically synthesized
caggaccaccugagcugugaugu

SEQ ID NO: 73339 - RNA, 23 nt, Artificial Sequence
  Chemically synthesized
aggaccaccugagcugugauguc

SEQ ID NO: 73340 - RNA, 23 nt, Artificial Sequence
  Chemically synthesized
cagagaggcaguugugagacagc

SEQ ID NO: 73341 - RNA, 23 nt, Artificial Sequence
  Chemically synthesized
agagaggcaguugugagacagca

SEQ ID NO: 73342 - RNA, 23 nt, Artificial Sequence
  Chemically synthesized
gagugcucagacgcaagaauucc

SEQ ID NO: 73343 - RNA, 23 nt, Artificial Sequence
  Chemically synthesized
ccccagcuguugucauuccgggu

SEQ ID NO: 73344 - RNA, 23 nt, Artificial Sequence
  Chemically synthesized
cccagcuguugucauuccggguc

SEQ ID NO: 73345 - RNA, 23 nt, Artificial Sequence
  Chemically synthesized
ccagcuguugucauuccgggucc

SEQ ID NO: 73346 - RNA, 23 nt, Artificial Sequence
  Chemically synthesized
cagcuguugucauuccggguccu

SEQ ID NO: 73347 - RNA, 23 nt, Artificial Sequence
  Chemically synthesized
agcuguugucauuccggguccug

SEQ ID NO: 73348 - RNA, 23 nt, Artificial Sequence
  Chemically synthesized
acccugcguccgaauccucugaa

SEQ ID NO: 73349 - RNA, 23 nt, Artificial Sequence
  Chemically synthesized
cccugcguccgaauccucugaag

SEQ ID NO: 73350 - RNA, 23 nt, Artificial Sequence
  Chemically synthesized
ccugcguccgaauccucugaagc

SEQ ID NO: 73351 - RNA, 23 nt, Artificial Sequence
  Chemically synthesized
cugcguccgaauccucugaagca

SEQ ID NO: 73352 - RNA, 23 nt, Artificial Sequence
  Chemically synthesized
augugacggaucugcucauccag

SEQ ID NO: 73353 - RNA, 23 nt, Artificial Sequence
  Chemically synthesized
gcagguugcucugcgucagaaag

SEQ ID NO: 73354 - RNA, 23 nt, Artificial Sequence
  Chemically synthesized
gagaggcaguugugagacagcaa

SEQ ID NO: 73355 - RNA, 23 nt, Artificial Sequence
  Chemically synthesized
agaggcaguugugagacagcaag

SEQ ID NO: 73356 - RNA, 23 nt, Artificial Sequence
  Chemically synthesized
gggaauaucugggccagccuaaa

SEQ ID NO: 73357 - RNA, 23 nt, Artificial Sequence
  Chemically synthesized
gugucuccaggcuguugaagcuc

SEQ ID NO: 73358 - RNA, 23 nt, Artificial Sequence
  Chemically synthesized
cagucugggcauuucuggaauga

SEQ ID NO: 73359 - RNA, 23 nt, Artificial Sequence
  Chemically synthesized
gucacugugaggaaggugagggc

SEQ ID NO: 73360 - RNA, 23 nt, Artificial Sequence
  Chemically synthesized
ucacaggaaagcuguccaaaucu

SEQ ID NO: 73361 - RNA, 23 nt, Artificial Sequence
  Chemically synthesized
cacaggaaagcuguccaaaucug

SEQ ID NO: 73362 - RNA, 23 nt, Artificial Sequence
  Chemically synthesized
acaggaaagcuguccaaaucuga

SEQ ID NO: 73363 - RNA, 23 nt, Artificial Sequence
  Chemically synthesized
ucacugugaggaaggugagggcg

SEQ ID NO: 73364 - RNA, 23 nt, Artificial Sequence
  Chemically synthesized
gaggcaguugugagacagcaaga

SEQ ID NO: 73365 - RNA, 23 nt, Artificial Sequence
  Chemically synthesized
ggggaauaucugggccagccuaa

SEQ ID NO: 73366 - RNA, 23 nt, Artificial Sequence
  Chemically synthesized
ggucaggaacagucugggcauuu

SEQ ID NO: 73367 - RNA, 23 nt, Artificial Sequence
  Chemically synthesized
gucaggaacagucugggcauuuc

SEQ ID NO: 73368 - RNA, 23 nt, Artificial Sequence
  Chemically synthesized
ucaggaacagucugggcauuucu

SEQ ID NO: 73369 - RNA, 23 nt, Artificial Sequence
  Chemically synthesized
gaggucaggaacagucugggcau

SEQ ID NO: 73370 - RNA, 23 nt, Artificial Sequence
  Chemically synthesized
aggucaggaacagucugggcauu

SEQ ID NO: 73371 - RNA, 23 nt, Artificial Sequence
  Chemically synthesized
aggccuccaaucucaggagguag

SEQ ID NO: 73372 - RNA, 23 nt, Artificial Sequence
  Chemically synthesized
gggccagccuaaaagucuguggg

SEQ ID NO: 73373 - RNA, 23 nt, Artificial Sequence
  Chemically synthesized
ggccagccuaaaagucugugggg

SEQ ID NO: 73374 - RNA, 23 nt, Artificial Sequence
  Chemically synthesized
gccagccuaaaagucuguggggc

SEQ ID NO: 73375 - RNA, 23 nt, Artificial Sequence
  Chemically synthesized
ccagccuaaaagucuguggggcc

SEQ ID NO: 73376 - RNA, 23 nt, Artificial Sequence
  Chemically synthesized
cagccuaaaagucuguggggccu

SEQ ID NO: 73377 - RNA, 23 nt, Artificial Sequence
  Chemically synthesized
gcgaguagaagacaaagcagauu

SEQ ID NO: 73378 - RNA, 23 nt, Artificial Sequence
  Chemically synthesized
uccagcagauucugagagagauc

SEQ ID NO: 73379 - RNA, 23 nt, Artificial Sequence
  Chemically synthesized
aaggaaccaggagaaguggggca

SEQ ID NO: 73380 - RNA, 23 nt, Artificial Sequence
  Chemically synthesized
aggcgguugugugucacugugag

SEQ ID NO: 73381 - RNA, 23 nt, Artificial Sequence
  Chemically synthesized
uccccacacacuggagagacuug

SEQ ID NO: 73382 - RNA, 23 nt, Artificial Sequence
  Chemically synthesized
ccggucucggcaucucccagauu

SEQ ID NO: 73383 - RNA, 23 nt, Artificial Sequence
  Chemically synthesized
cggucucggcaucucccagauuc

SEQ ID NO: 73384 - RNA, 23 nt, Artificial Sequence
  Chemically synthesized
acaucuccaccgugucagagggc

SEQ ID NO: 73385 - RNA, 23 nt, Artificial Sequence
  Chemically synthesized
cagcccaggagaagagcauguga

SEQ ID NO: 73386 - RNA, 23 nt, Artificial Sequence
  Chemically synthesized
cucccagauucaagggugccaag

SEQ ID NO: 73387 - RNA, 23 nt, Artificial Sequence
  Chemically synthesized
ggagguagcguguccagcagauu

SEQ ID NO: 73388 - RNA, 23 nt, Artificial Sequence
  Chemically synthesized
guccccacacacuggagagacuu

SEQ ID NO: 73389 - RNA, 23 nt, Artificial Sequence
  Chemically synthesized
ggccgcaaagaacucuucgcccu

SEQ ID NO: 73390 - RNA, 23 nt, Artificial Sequence
  Chemically synthesized
uggggaauaucugggccagccua

SEQ ID NO: 73391 - RNA, 23 nt, Artificial Sequence
  Chemically synthesized
caggcgguugugugucacuguga

SEQ ID NO: 73392 - RNA, 23 nt, Artificial Sequence
  Chemically synthesized
aggccucccacacaguucuuggu

SEQ ID NO: 73393 - RNA, 23 nt, Artificial Sequence
  Chemically synthesized
caggagguugcugugcaggacaa

SEQ ID NO: 73394 - RNA, 23 nt, Artificial Sequence
  Chemically synthesized
aggagguugcugugcaggacaag

SEQ ID NO: 73395 - RNA, 23 nt, Artificial Sequence
  Chemically synthesized
ggagguugcugugcaggacaagg

SEQ ID NO: 73396 - RNA, 23 nt, Artificial Sequence
  Chemically synthesized
cagcagguugcucugcgucagaa

SEQ ID NO: 73397 - RNA, 23 nt, Artificial Sequence
  Chemically synthesized
agcagguugcucugcgucagaaa

SEQ ID NO: 73398 - RNA, 23 nt, Artificial Sequence
  Chemically synthesized
ccucgaagucucggcagcuugau

SEQ ID NO: 73399 - RNA, 23 nt, Artificial Sequence
  Chemically synthesized
ggcgggaaaccacaaggaaccag

SEQ ID NO: 73400 - RNA, 23 nt, Artificial Sequence
  Chemically synthesized
cgucggaugcuguccugguacuu

SEQ ID NO: 73401 - RNA, 23 nt, Artificial Sequence
  Chemically synthesized
caggccuccaaucucaggaggua

SEQ ID NO: 73402 - RNA, 23 nt, Artificial Sequence
  Chemically synthesized
gggcgggaaaccacaaggaacca

SEQ ID NO: 73403 - RNA, 19 nt, Artificial Sequence
  Chemically synthesized
uguuugugugccugcugga

SEQ ID NO: 73404 - RNA, 19 nt, Artificial Sequence
  Chemically synthesized
cuuuggugccuacuccauu

SEQ ID NO: 73405 - RNA, 19 nt, Artificial Sequence
  Chemically synthesized
cuuuaccaggaauuacuau

SEQ ID NO: 73406 - RNA, 19 nt, Artificial Sequence
  Chemically synthesized
caggaauuacuauguucgg

SEQ ID NO: 73407 - RNA, 19 nt, Artificial Sequence
  Chemically synthesized
uacuuuggugccuacucca

SEQ ID NO: 73408 - RNA, 19 nt, Artificial Sequence
  Chemically synthesized
gguacuuuggugccuacuc

SEQ ID NO: 73409 - RNA, 19 nt, Artificial Sequence
  Chemically synthesized
cacccagugguacuuuggu

SEQ ID NO: 73410 - RNA, 19 nt, Artificial Sequence
  Chemically synthesized
aagcuguucgggcccuuua

SEQ ID NO: 73411 - RNA, 19 nt, Artificial Sequence
  Chemically synthesized
gggacagaaguacaugacc

SEQ ID NO: 73412 - RNA, 19 nt, Artificial Sequence
  Chemically synthesized
acuuuggugccuacuccau

SEQ ID NO: 73413 - RNA, 19 nt, Artificial Sequence
  Chemically synthesized
gaauuacuauguucgggcc

SEQ ID NO: 73414 - RNA, 19 nt, Artificial Sequence
  Chemically synthesized
aagaggaagaagggcucca

SEQ ID NO: 73415 - RNA, 19 nt, Artificial Sequence
  Chemically synthesized
uuugugugccugcuggagu

SEQ ID NO: 73416 - RNA, 19 nt, Artificial Sequence
  Chemically synthesized
gacagaaguacaugaccgc

SEQ ID NO: 73417 - RNA, 19 nt, Artificial Sequence
  Chemically synthesized
aggaauuacuauguucggg

SEQ ID NO: 73418 - RNA, 19 nt, Artificial Sequence
  Chemically synthesized
guacuuuggugccuacucc

SEQ ID NO: 73419 - RNA, 19 nt, Artificial Sequence
  Chemically synthesized
auuacuauguucgggccgu

SEQ ID NO: 73420 - RNA, 19 nt, Artificial Sequence
  Chemically synthesized
cuucacccagugguacuuu

SEQ ID NO: 73421 - RNA, 19 nt, Artificial Sequence
  Chemically synthesized
ugguacuuuggugccuacu

SEQ ID NO: 73422 - RNA, 19 nt, Artificial Sequence
  Chemically synthesized
uucacccagugguacuuug

SEQ ID NO: 73423 - RNA, 19 nt, Artificial Sequence
  Chemically synthesized
uuacuauguucgggccguc

SEQ ID NO: 73424 - RNA, 19 nt, Artificial Sequence
  Chemically synthesized
uggugccuacuccauugug

SEQ ID NO: 73425 - RNA, 19 nt, Artificial Sequence
  Chemically synthesized
uuuaccaggaauuacuaug

SEQ ID NO: 73426 - RNA, 19 nt, Artificial Sequence
  Chemically synthesized
ucacccagugguacuuugg

SEQ ID NO: 73427 - RNA, 19 nt, Artificial Sequence
  Chemically synthesized
aauuacuauguucgggccg

SEQ ID NO: 73428 - RNA, 19 nt, Artificial Sequence
  Chemically synthesized
uuggugccuacuccauugu

SEQ ID NO: 73429 - RNA, 19 nt, Artificial Sequence
  Chemically synthesized
acagaaguacaugaccgcc

SEQ ID NO: 73430 - RNA, 19 nt, Artificial Sequence
  Chemically synthesized
uccagcaggcacacaaaca

SEQ ID NO: 73431 - RNA, 19 nt, Artificial Sequence
  Chemically synthesized
aauggaguaggcaccaaag

SEQ ID NO: 73432 - RNA, 19 nt, Artificial Sequence
  Chemically synthesized
auaguaauuccugguaaag

SEQ ID NO: 73433 - RNA, 19 nt, Artificial Sequence
  Chemically synthesized
ccgaacauaguaauuccug

SEQ ID NO: 73434 - RNA, 19 nt, Artificial Sequence
  Chemically synthesized
uggaguaggcaccaaagua

SEQ ID NO: 73435 - RNA, 19 nt, Artificial Sequence
  Chemically synthesized
gaguaggcaccaaaguacc

SEQ ID NO: 73436 - RNA, 19 nt, Artificial Sequence
  Chemically synthesized
accaaaguaccacugggug

SEQ ID NO: 73437 - RNA, 19 nt, Artificial Sequence
  Chemically synthesized
uaaagggcccgaacagcuu

SEQ ID NO: 73438 - RNA, 19 nt, Artificial Sequence
  Chemically synthesized
ggucauguacuucuguccc

SEQ ID NO: 73439 - RNA, 19 nt, Artificial Sequence
  Chemically synthesized
auggaguaggcaccaaagu

SEQ ID NO: 73440 - RNA, 19 nt, Artificial Sequence
  Chemically synthesized
ggcccgaacauaguaauuc

SEQ ID NO: 73441 - RNA, 19 nt, Artificial Sequence
  Chemically synthesized
uggagcccuucuuccucuu

SEQ ID NO: 73442 - RNA, 19 nt, Artificial Sequence
  Chemically synthesized
acuccagcaggcacacaaa

SEQ ID NO: 73443 - RNA, 19 nt, Artificial Sequence
  Chemically synthesized
gcggucauguacuucuguc

SEQ ID NO: 73444 - RNA, 19 nt, Artificial Sequence
  Chemically synthesized
cccgaacauaguaauuccu

SEQ ID NO: 73445 - RNA, 19 nt, Artificial Sequence
  Chemically synthesized
ggaguaggcaccaaaguac

SEQ ID NO: 73446 - RNA, 19 nt, Artificial Sequence
  Chemically synthesized
acggcccgaacauaguaau

SEQ ID NO: 73447 - RNA, 19 nt, Artificial Sequence
  Chemically synthesized
aaaguaccacugggugaag

SEQ ID NO: 73448 - RNA, 19 nt, Artificial Sequence
  Chemically synthesized
aguaggcaccaaaguacca

SEQ ID NO: 73449 - RNA, 19 nt, Artificial Sequence
  Chemically synthesized
caaaguaccacugggugaa

SEQ ID NO: 73450 - RNA, 19 nt, Artificial Sequence
  Chemically synthesized
gacggcccgaacauaguaa

SEQ ID NO: 73451 - RNA, 19 nt, Artificial Sequence
  Chemically synthesized
cacaauggaguaggcacca

SEQ ID NO: 73452 - RNA, 19 nt, Artificial Sequence
  Chemically synthesized
cauaguaauuccugguaaa

SEQ ID NO: 73453 - RNA, 19 nt, Artificial Sequence
  Chemically synthesized
ccaaaguaccacuggguga

SEQ ID NO: 73454 - RNA, 19 nt, Artificial Sequence
  Chemically synthesized
cggcccgaacauaguaauu

SEQ ID NO: 73455 - RNA, 19 nt, Artificial Sequence
  Chemically synthesized
acaauggaguaggcaccaa

SEQ ID NO: 73456 - RNA, 19 nt, Artificial Sequence
  Chemically synthesized
ggcggucauguacuucugu

SEQ ID NO: 73457 - RNA, 21 nt, Artificial Sequence
  Chemically synthesized
guuugugugccugcuggagua

SEQ ID NO: 73458 - RNA, 21 nt, Artificial Sequence
  Chemically synthesized
cuuuggugccuacuccauugu

SEQ ID NO: 73459 - RNA, 21 nt, Artificial Sequence
  Chemically synthesized
gcuucacccagugguacuuug

SEQ ID NO: 73460 - RNA, 21 nt, Artificial Sequence
  Chemically synthesized
caggaauuacuauguucgggc

SEQ ID NO: 73461 - RNA, 21 nt, Artificial Sequence
  Chemically synthesized
uguuugugugccugcuggagu

SEQ ID NO: 73462 - RNA, 21 nt, Artificial Sequence
  Chemically synthesized
auugcgagcggcaucuaccua

SEQ ID NO: 73463 - RNA, 21 nt, Artificial Sequence
  Chemically synthesized
uacuuuggugccuacuccauu

SEQ ID NO: 73464 - RNA, 21 nt, Artificial Sequence
  Chemically synthesized
uucgggcccuuuaccaggaau

SEQ ID NO: 73465 - RNA, 21 nt, Artificial Sequence
  Chemically synthesized
gaauuacuauguucgggccgu

SEQ ID NO: 73466 - RNA, 21 nt, Artificial Sequence
  Chemically synthesized
agugguacuuuggugccuacu

SEQ ID NO: 73467 - RNA, 21 nt, Artificial Sequence
  Chemically synthesized
ccuuuaccaggaauuacuaug

SEQ ID NO: 73468 - RNA, 21 nt, Artificial Sequence
  Chemically synthesized
ccaggaauuacuauguucggg

SEQ ID NO: 73469 - RNA, 21 nt, Artificial Sequence
  Chemically synthesized
uuaccaggaauuacuauguuc

SEQ ID NO: 73470 - RNA, 21 nt, Artificial Sequence
  Chemically synthesized
cuuuaccaggaauuacuaugu

SEQ ID NO: 73471 - RNA, 21 nt, Artificial Sequence
  Chemically synthesized
gugguacuuuggugccuacuc

SEQ ID NO: 73472 - RNA, 21 nt, Artificial Sequence
  Chemically synthesized
accaggaauuacuauguucgg

SEQ ID NO: 73473 - RNA, 21 nt, Artificial Sequence
  Chemically synthesized
cuucacccagugguacuuugg

SEQ ID NO: 73474 - RNA, 21 nt, Artificial Sequence
  Chemically synthesized
uuacuauguucgggccguccu

SEQ ID NO: 73475 - RNA, 21 nt, Artificial Sequence
  Chemically synthesized
acuuuggugccuacuccauug

SEQ ID NO: 73476 - RNA, 21 nt, Artificial Sequence
  Chemically synthesized
uuuggugccuacuccauugug

SEQ ID NO: 73477 - RNA, 21 nt, Artificial Sequence
  Chemically synthesized
uucacccagugguacuuuggu

SEQ ID NO: 73478 - RNA, 21 nt, Artificial Sequence
  Chemically synthesized
uaccaggaauuacuauguucg

SEQ ID NO: 73479 - RNA, 21 nt, Artificial Sequence
  Chemically synthesized
aggaauuacuauguucgggcc

SEQ ID NO: 73480 - RNA, 21 nt, Artificial Sequence
  Chemically synthesized
aauuacuauguucgggccguc

SEQ ID NO: 73481 - RNA, 21 nt, Artificial Sequence
  Chemically synthesized
ucacccagugguacuuuggug

SEQ ID NO: 73482 - RNA, 21 nt, Artificial Sequence
  Chemically synthesized
uuugugugccugcuggaguac

SEQ ID NO: 73483 - RNA, 21 nt, Artificial Sequence
  Chemically synthesized
ugguacuuuggugccuacucc

SEQ ID NO: 73484 - RNA, 21 nt, Artificial Sequence
  Chemically synthesized
auuacuauguucgggccgucc

SEQ ID NO: 73485 - RNA, 21 nt, Artificial Sequence
  Chemically synthesized
uuggugccuacuccauugugg

SEQ ID NO: 73486 - RNA, 21 nt, Artificial Sequence
  Chemically synthesized
uacuccagcaggcacacaaac

SEQ ID NO: 73487 - RNA, 21 nt, Artificial Sequence
  Chemically synthesized
acaauggaguaggcaccaaag

SEQ ID NO: 73488 - RNA, 21 nt, Artificial Sequence
  Chemically synthesized
caaaguaccacugggugaagc

SEQ ID NO: 73489 - RNA, 21 nt, Artificial Sequence
  Chemically synthesized
gcccgaacauaguaauuccug

SEQ ID NO: 73490 - RNA, 21 nt, Artificial Sequence
  Chemically synthesized
acuccagcaggcacacaaaca

SEQ ID NO: 73491 - RNA, 21 nt, Artificial Sequence
  Chemically synthesized
uagguagaugccgcucgcaau

SEQ ID NO: 73492 - RNA, 21 nt, Artificial Sequence
  Chemically synthesized
aauggaguaggcaccaaagua

SEQ ID NO: 73493 - RNA, 21 nt, Artificial Sequence
  Chemically synthesized
auuccugguaaagggcccgaa

SEQ ID NO: 73494 - RNA, 21 nt, Artificial Sequence
  Chemically synthesized
acggcccgaacauaguaauuc

SEQ ID NO: 73495 - RNA, 21 nt, Artificial Sequence
  Chemically synthesized
aguaggcaccaaaguaccacu

SEQ ID NO: 73496 - RNA, 21 nt, Artificial Sequence
  Chemically synthesized
cauaguaauuccugguaaagg

SEQ ID NO: 73497 - RNA, 21 nt, Artificial Sequence
  Chemically synthesized
cccgaacauaguaauuccugg

SEQ ID NO: 73498 - RNA, 21 nt, Artificial Sequence
  Chemically synthesized
gaacauaguaauuccugguaa

SEQ ID NO: 73499 - RNA, 21 nt, Artificial Sequence
  Chemically synthesized
acauaguaauuccugguaaag

SEQ ID NO: 73500 - RNA, 21 nt, Artificial Sequence
  Chemically synthesized
gaguaggcaccaaaguaccac

SEQ ID NO: 73501 - RNA, 21 nt, Artificial Sequence
  Chemically synthesized
ccgaacauaguaauuccuggu

SEQ ID NO: 73502 - RNA, 21 nt, Artificial Sequence
  Chemically synthesized
ccaaaguaccacugggugaag

SEQ ID NO: 73503 - RNA, 21 nt, Artificial Sequence
  Chemically synthesized
aggacggcccgaacauaguaa

SEQ ID NO: 73504 - RNA, 21 nt, Artificial Sequence
  Chemically synthesized
caauggaguaggcaccaaagu

SEQ ID NO: 73505 - RNA, 21 nt, Artificial Sequence
  Chemically synthesized
cacaauggaguaggcaccaaa

SEQ ID NO: 73506 - RNA, 21 nt, Artificial Sequence
  Chemically synthesized
accaaaguaccacugggugaa

SEQ ID NO: 73507 - RNA, 21 nt, Artificial Sequence
  Chemically synthesized
cgaacauaguaauuccuggua

SEQ ID NO: 73508 - RNA, 21 nt, Artificial Sequence
  Chemically synthesized
ggcccgaacauaguaauuccu

SEQ ID NO: 73509 - RNA, 21 nt, Artificial Sequence
  Chemically synthesized
gacggcccgaacauaguaauu

SEQ ID NO: 73510 - RNA, 21 nt, Artificial Sequence
  Chemically synthesized
caccaaaguaccacuggguga

SEQ ID NO: 73511 - RNA, 21 nt, Artificial Sequence
  Chemically synthesized
guacuccagcaggcacacaaa

SEQ ID NO: 73512 - RNA, 21 nt, Artificial Sequence
  Chemically synthesized
ggaguaggcaccaaaguacca

SEQ ID NO: 73513 - RNA, 21 nt, Artificial Sequence
  Chemically synthesized
ggacggcccgaacauaguaau

SEQ ID NO: 73514 - RNA, 21 nt, Artificial Sequence
  Chemically synthesized
ccacaauggaguaggcaccaa

SEQ ID NO: 73515 - RNA, 23 nt, Artificial Sequence
  Chemically synthesized
aaguacaugaccgccguggugaa

SEQ ID NO: 73516 - RNA, 23 nt, Artificial Sequence
  Chemically synthesized
uguucgggcccuuuaccaggaau

SEQ ID NO: 73517 - RNA, 23 nt, Artificial Sequence
  Chemically synthesized
auugcgagcggcaucuaccuacu

SEQ ID NO: 73518 - RNA, 23 nt, Artificial Sequence
  Chemically synthesized
uucaccacggcggucauguacuu

SEQ ID NO: 73519 - RNA, 23 nt, Artificial Sequence
  Chemically synthesized
auuccugguaaagggcccgaaca

SEQ ID NO: 73520 - RNA, 23 nt, Artificial Sequence
  Chemically synthesized
aguagguagaugccgcucgcaau

SEQ ID NO: 73521 - RNA, 23 nt, Artificial Sequence
  Chemically synthesized
uugugugccugcuggaguacccc

SEQ ID NO: 73522 - RNA, 23 nt, Artificial Sequence
  Chemically synthesized
uuugugugccugcuggaguaccc

SEQ ID NO: 73523 - RNA, 23 nt, Artificial Sequence
  Chemically synthesized
guuugugugccugcuggaguacc

SEQ ID NO: 73524 - RNA, 23 nt, Artificial Sequence
  Chemically synthesized
uguuugugugccugcuggaguac

SEQ ID NO: 73525 - RNA, 23 nt, Artificial Sequence
  Chemically synthesized
guguuugugugccugcuggagua

SEQ ID NO: 73526 - RNA, 23 nt, Artificial Sequence
  Chemically synthesized
cguguuugugugccugcuggagu

SEQ ID NO: 73527 - RNA, 23 nt, Artificial Sequence
  Chemically synthesized
gcguguuugugugccugcuggag

SEQ ID NO: 73528 - RNA, 23 nt, Artificial Sequence
  Chemically synthesized
ggcguguuugugugccugcugga

SEQ ID NO: 73529 - RNA, 23 nt, Artificial Sequence
  Chemically synthesized
cuuuggugccuacuccauugugg

SEQ ID NO: 73530 - RNA, 23 nt, Artificial Sequence
  Chemically synthesized
acuuuggugccuacuccauugug

SEQ ID NO: 73531 - RNA, 23 nt, Artificial Sequence
  Chemically synthesized
uacuuuggugccuacuccauugu

SEQ ID NO: 73532 - RNA, 23 nt, Artificial Sequence
  Chemically synthesized
guacuuuggugccuacuccauug

SEQ ID NO: 73533 - RNA, 23 nt, Artificial Sequence
  Chemically synthesized
gguacuuuggugccuacuccauu

SEQ ID NO: 73534 - RNA, 23 nt, Artificial Sequence
  Chemically synthesized
ugguacuuuggugccuacuccau

SEQ ID NO: 73535 - RNA, 23 nt, Artificial Sequence
  Chemically synthesized
aagcuguucgggcccuuuaccag

SEQ ID NO: 73536 - RNA, 23 nt, Artificial Sequence
  Chemically synthesized
gaagcuguucgggcccuuuacca

SEQ ID NO: 73537 - RNA, 23 nt, Artificial Sequence
  Chemically synthesized
ugaagcuguucgggcccuuuacc

SEQ ID NO: 73538 - RNA, 23 nt, Artificial Sequence
  Chemically synthesized
gugaagcuguucgggcccuuuac

SEQ ID NO: 73539 - RNA, 23 nt, Artificial Sequence
  Chemically synthesized
ggugaagcuguucgggcccuuua

SEQ ID NO: 73540 - RNA, 23 nt, Artificial Sequence
  Chemically synthesized
gaauuacuauguucgggccgucc

SEQ ID NO: 73541 - RNA, 23 nt, Artificial Sequence
  Chemically synthesized
aagaggaagaagggcuccaccau

SEQ ID NO: 73542 - RNA, 23 nt, Artificial Sequence
  Chemically synthesized
gaagaggaagaagggcuccacca

SEQ ID NO: 73543 - RNA, 23 nt, Artificial Sequence
  Chemically synthesized
ggaagaggaagaagggcuccacc

SEQ ID NO: 73544 - RNA, 23 nt, Artificial Sequence
  Chemically synthesized
gggaagaggaagaagggcuccac

SEQ ID NO: 73545 - RNA, 23 nt, Artificial Sequence
  Chemically synthesized
ggggaagaggaagaagggcucca

SEQ ID NO: 73546 - RNA, 23 nt, Artificial Sequence
  Chemically synthesized
uuuggugccuacuccauuguggc

SEQ ID NO: 73547 - RNA, 23 nt, Artificial Sequence
  Chemically synthesized
auuacuauguucgggccguccug

SEQ ID NO: 73548 - RNA, 23 nt, Artificial Sequence
  Chemically synthesized
aauuacuauguucgggccguccu

SEQ ID NO: 73549 - RNA, 23 nt, Artificial Sequence
  Chemically synthesized
uuacuauguucgggccguccugc

SEQ ID NO: 73550 - RNA, 23 nt, Artificial Sequence
  Chemically synthesized
uggugccuacuccauuguggcgg

SEQ ID NO: 73551 - RNA, 23 nt, Artificial Sequence
  Chemically synthesized
uuggugccuacuccauuguggcg

SEQ ID NO: 73552 - RNA, 23 nt, Artificial Sequence
  Chemically synthesized
gggguacuccagcaggcacacaa

SEQ ID NO: 73553 - RNA, 23 nt, Artificial Sequence
  Chemically synthesized
ggguacuccagcaggcacacaaa

SEQ ID NO: 73554 - RNA, 23 nt, Artificial Sequence
  Chemically synthesized
gguacuccagcaggcacacaaac

SEQ ID NO: 73555 - RNA, 23 nt, Artificial Sequence
  Chemically synthesized
guacuccagcaggcacacaaaca

SEQ ID NO: 73556 - RNA, 23 nt, Artificial Sequence
  Chemically synthesized
uacuccagcaggcacacaaacac

SEQ ID NO: 73557 - RNA, 23 nt, Artificial Sequence
  Chemically synthesized
acuccagcaggcacacaaacacg

SEQ ID NO: 73558 - RNA, 23 nt, Artificial Sequence
  Chemically synthesized
cuccagcaggcacacaaacacgc

SEQ ID NO: 73559 - RNA, 23 nt, Artificial Sequence
  Chemically synthesized
uccagcaggcacacaaacacgcc

SEQ ID NO: 73560 - RNA, 23 nt, Artificial Sequence
  Chemically synthesized
ccacaauggaguaggcaccaaag

SEQ ID NO: 73561 - RNA, 23 nt, Artificial Sequence
  Chemically synthesized
cacaauggaguaggcaccaaagu

SEQ ID NO: 73562 - RNA, 23 nt, Artificial Sequence
  Chemically synthesized
acaauggaguaggcaccaaagua

SEQ ID NO: 73563 - RNA, 23 nt, Artificial Sequence
  Chemically synthesized
caauggaguaggcaccaaaguac

SEQ ID NO: 73564 - RNA, 23 nt, Artificial Sequence
  Chemically synthesized
aauggaguaggcaccaaaguacc

SEQ ID NO: 73565 - RNA, 23 nt, Artificial Sequence
  Chemically synthesized
auggaguaggcaccaaaguacca

SEQ ID NO: 73566 - RNA, 23 nt, Artificial Sequence
  Chemically synthesized
cugguaaagggcccgaacagcuu

SEQ ID NO: 73567 - RNA, 23 nt, Artificial Sequence
  Chemically synthesized
ugguaaagggcccgaacagcuuc

SEQ ID NO: 73568 - RNA, 23 nt, Artificial Sequence
  Chemically synthesized
gguaaagggcccgaacagcuuca

SEQ ID NO: 73569 - RNA, 23 nt, Artificial Sequence
  Chemically synthesized
guaaagggcccgaacagcuucac

SEQ ID NO: 73570 - RNA, 23 nt, Artificial Sequence
  Chemically synthesized
uaaagggcccgaacagcuucacc

SEQ ID NO: 73571 - RNA, 23 nt, Artificial Sequence
  Chemically synthesized
ggacggcccgaacauaguaauuc

SEQ ID NO: 73572 - RNA, 23 nt, Artificial Sequence
  Chemically synthesized
augguggagcccuucuuccucuu

SEQ ID NO: 73573 - RNA, 23 nt, Artificial Sequence
  Chemically synthesized
ugguggagcccuucuuccucuuc

SEQ ID NO: 73574 - RNA, 23 nt, Artificial Sequence
  Chemically synthesized
gguggagcccuucuuccucuucc

SEQ ID NO: 73575 - RNA, 23 nt, Artificial Sequence
  Chemically synthesized
guggagcccuucuuccucuuccc

SEQ ID NO: 73576 - RNA, 23 nt, Artificial Sequence
  Chemically synthesized
uggagcccuucuuccucuucccc

SEQ ID NO: 73577 - RNA, 23 nt, Artificial Sequence
  Chemically synthesized
gccacaauggaguaggcaccaaa

SEQ ID NO: 73578 - RNA, 23 nt, Artificial Sequence
  Chemically synthesized
caggacggcccgaacauaguaau

SEQ ID NO: 73579 - RNA, 23 nt, Artificial Sequence
  Chemically synthesized
aggacggcccgaacauaguaauu

SEQ ID NO: 73580 - RNA, 23 nt, Artificial Sequence
  Chemically synthesized
gcaggacggcccgaacauaguaa

SEQ ID NO: 73581 - RNA, 23 nt, Artificial Sequence
  Chemically synthesized
ccgccacaauggaguaggcacca

SEQ ID NO: 73582 - RNA, 23 nt, Artificial Sequence
  Chemically synthesized
cgccacaauggaguaggcaccaa

SEQ ID NO: 73583 - RNA, 19 nt, Artificial Sequence
  Chemically synthesized
cauaucucucccuucuuua

SEQ ID NO: 73584 - RNA, 19 nt, Artificial Sequence
  Chemically synthesized
uuaucucccugcuucauau

SEQ ID NO: 73585 - RNA, 19 nt, Artificial Sequence
  Chemically synthesized
cucccugcuucauaucucu

SEQ ID NO: 73586 - RNA, 19 nt, Artificial Sequence
  Chemically synthesized
gcuucauaucucucccuuc

SEQ ID NO: 73587 - RNA, 19 nt, Artificial Sequence
  Chemically synthesized
cauagugggccuucauuaa

SEQ ID NO: 73588 - RNA, 19 nt, Artificial Sequence
  Chemically synthesized
caacuucccuguucuuuaa

SEQ ID NO: 73589 - RNA, 19 nt, Artificial Sequence
  Chemically synthesized
cuugcacuccugaauuuua

SEQ ID NO: 73590 - RNA, 19 nt, Artificial Sequence
  Chemically synthesized
ggugcaaggagaugucuga

SEQ ID NO: 73591 - RNA, 19 nt, Artificial Sequence
  Chemically synthesized
agugaugccgguaaagaaa

SEQ ID NO: 73592 - RNA, 19 nt, Artificial Sequence
  Chemically synthesized
agggaagaaggcaagccaa

SEQ ID NO: 73593 - RNA, 19 nt, Artificial Sequence
  Chemically synthesized
agucaaggugcucaauaaa

SEQ ID NO: 73594 - RNA, 19 nt, Artificial Sequence
  Chemically synthesized
cguccaucucucucccuua

SEQ ID NO: 73595 - RNA, 19 nt, Artificial Sequence
  Chemically synthesized
ccaacuucccuguucuuua

SEQ ID NO: 73596 - RNA, 19 nt, Artificial Sequence
  Chemically synthesized
ccugcuucauaucucuccc

SEQ ID NO: 73597 - RNA, 19 nt, Artificial Sequence
  Chemically synthesized
guuucccuagacucuguaa

SEQ ID NO: 73598 - RNA, 19 nt, Artificial Sequence
  Chemically synthesized
cucccuucuuuaccuucau

SEQ ID NO: 73599 - RNA, 19 nt, Artificial Sequence
  Chemically synthesized
ugcuucauaucucucccuu

SEQ ID NO: 73600 - RNA, 19 nt, Artificial Sequence
  Chemically synthesized
cuagagugagaguuuggaa

SEQ ID NO: 73601 - RNA, 19 nt, Artificial Sequence
  Chemically synthesized
acucuccuuugauauuaug

SEQ ID NO: 73602 - RNA, 19 nt, Artificial Sequence
  Chemically synthesized
caucgggugccaaauaaau

SEQ ID NO: 73603 - RNA, 19 nt, Artificial Sequence
  Chemically synthesized
cugucuuuuuccuuccuga

SEQ ID NO: 73604 - RNA, 19 nt, Artificial Sequence
  Chemically synthesized
aauggugauuucuugcuaa

SEQ ID NO: 73605 - RNA, 19 nt, Artificial Sequence
  Chemically synthesized
aaaagagggaagaaggcaa

SEQ ID NO: 73606 - RNA, 19 nt, Artificial Sequence
  Chemically synthesized
gacugcacaggaaaugcaa

SEQ ID NO: 73607 - RNA, 19 nt, Artificial Sequence
  Chemically synthesized
aucucucccuucuuuaccu

SEQ ID NO: 73608 - RNA, 19 nt, Artificial Sequence
  Chemically synthesized
cugcuucauaucucucccu

SEQ ID NO: 73609 - RNA, 19 nt, Artificial Sequence
  Chemically synthesized
gaguuuggaagguguccaa

SEQ ID NO: 73610 - RNA, 19 nt, Artificial Sequence
  Chemically synthesized
auaucucucccuucuuuac

SEQ ID NO: 73611 - RNA, 19 nt, Artificial Sequence
  Chemically synthesized
ucucucccuucuuuaccuu

SEQ ID NO: 73612 - RNA, 19 nt, Artificial Sequence
  Chemically synthesized
ccugcacuucauaucuaga

SEQ ID NO: 73613 - RNA, 19 nt, Artificial Sequence
  Chemically synthesized
cucuagucacccucuucaa

SEQ ID NO: 73614 - RNA, 19 nt, Artificial Sequence
  Chemically synthesized
cuuuuauuucagugccaua

SEQ ID NO: 73615 - RNA, 19 nt, Artificial Sequence
  Chemically synthesized
cuugcugcaguguccagaa

SEQ ID NO: 73616 - RNA, 19 nt, Artificial Sequence
  Chemically synthesized
acuuaucaaggaucgggaa

SEQ ID NO: 73617 - RNA, 19 nt, Artificial Sequence
  Chemically synthesized
cgccaucuaugguguggau

SEQ ID NO: 73618 - RNA, 19 nt, Artificial Sequence
  Chemically synthesized
caaugugcacuucacugga

SEQ ID NO: 73619 - RNA, 19 nt, Artificial Sequence
  Chemically synthesized
cauccucaucaucaggaaa

SEQ ID NO: 73620 - RNA, 19 nt, Artificial Sequence
  Chemically synthesized
gcuuaucucccugcuucau

SEQ ID NO: 73621 - RNA, 19 nt, Artificial Sequence
  Chemically synthesized
ccuuuuuguccuagaguga

SEQ ID NO: 73622 - RNA, 19 nt, Artificial Sequence
  Chemically synthesized
aggagagugaugccgguaa

SEQ ID NO: 73623 - RNA, 19 nt, Artificial Sequence
  Chemically synthesized
uucauaucucucccuucuu

SEQ ID NO: 73624 - RNA, 19 nt, Artificial Sequence
  Chemically synthesized
gguugaccaacaagaugga

SEQ ID NO: 73625 - RNA, 19 nt, Artificial Sequence
  Chemically synthesized
agcuuaucucccugcuuca

SEQ ID NO: 73626 - RNA, 19 nt, Artificial Sequence
  Chemically synthesized
acuggaauuucgcucugga

SEQ ID NO: 73627 - RNA, 19 nt, Artificial Sequence
  Chemically synthesized
cauuaguuaagaugucuga

SEQ ID NO: 73628 - RNA, 19 nt, Artificial Sequence
  Chemically synthesized
gugcaaggagaugucugaa

SEQ ID NO: 73629 - RNA, 19 nt, Artificial Sequence
  Chemically synthesized
cuuugaucuucaggaugca

SEQ ID NO: 73630 - RNA, 19 nt, Artificial Sequence
  Chemically synthesized
cuuuuuccuuccugagaaa

SEQ ID NO: 73631 - RNA, 19 nt, Artificial Sequence
  Chemically synthesized
ucugaagaagcaaacauga

SEQ ID NO: 73632 - RNA, 19 nt, Artificial Sequence
  Chemically synthesized
aguuaagaugucugagaga

SEQ ID NO: 73633 - RNA, 19 nt, Artificial Sequence
  Chemically synthesized
caugcauccucaucaucag

SEQ ID NO: 73634 - RNA, 19 nt, Artificial Sequence
  Chemically synthesized
uguugagcgaauuguuaga

SEQ ID NO: 73635 - RNA, 19 nt, Artificial Sequence
  Chemically synthesized
gcugguuaaggugaacgca

SEQ ID NO: 73636 - RNA, 19 nt, Artificial Sequence
  Chemically synthesized
cucaacuugcugccuaaga

SEQ ID NO: 73637 - RNA, 19 nt, Artificial Sequence
  Chemically synthesized
gagguuccugguacaucga

SEQ ID NO: 73638 - RNA, 19 nt, Artificial Sequence
  Chemically synthesized
ccuccagucuguucucaca

SEQ ID NO: 73639 - RNA, 19 nt, Artificial Sequence
  Chemically synthesized
ccuagagugagaguuugga

SEQ ID NO: 73640 - RNA, 19 nt, Artificial Sequence
  Chemically synthesized
gagaugucugaauacugca

SEQ ID NO: 73641 - RNA, 19 nt, Artificial Sequence
  Chemically synthesized
cuuugagugugggacucca

SEQ ID NO: 73642 - RNA, 19 nt, Artificial Sequence
  Chemically synthesized
cccugcuucauaucucucc

SEQ ID NO: 73643 - RNA, 19 nt, Artificial Sequence
  Chemically synthesized
ccagcuccuuuucugugaa

SEQ ID NO: 73644 - RNA, 19 nt, Artificial Sequence
  Chemically synthesized
caggaugcacgguuucugu

SEQ ID NO: 73645 - RNA, 19 nt, Artificial Sequence
  Chemically synthesized
uguuguugagcgaauuguu

SEQ ID NO: 73646 - RNA, 19 nt, Artificial Sequence
  Chemically synthesized
ucucccugcuucauaucuc

SEQ ID NO: 73647 - RNA, 19 nt, Artificial Sequence
  Chemically synthesized
uugugagccuugcugccaa

SEQ ID NO: 73648 - RNA, 19 nt, Artificial Sequence
  Chemically synthesized
aguugaagagccugacaag

SEQ ID NO: 73649 - RNA, 19 nt, Artificial Sequence
  Chemically synthesized
gagagagaaccuuuccacu

SEQ ID NO: 73650 - RNA, 19 nt, Artificial Sequence
  Chemically synthesized
cagacaugauaugcggcua

SEQ ID NO: 73651 - RNA, 19 nt, Artificial Sequence
  Chemically synthesized
guguuucccuagacucugu

SEQ ID NO: 73652 - RNA, 19 nt, Artificial Sequence
  Chemically synthesized
gugagaguuuggaaggugu

SEQ ID NO: 73653 - RNA, 19 nt, Artificial Sequence
  Chemically synthesized
aagugaaguuguaaacaca

SEQ ID NO: 73654 - RNA, 19 nt, Artificial Sequence
  Chemically synthesized
caacuugcugccuaagagg

SEQ ID NO: 73655 - RNA, 19 nt, Artificial Sequence
  Chemically synthesized
agguuuuucagcucuuuga

SEQ ID NO: 73656 - RNA, 19 nt, Artificial Sequence
  Chemically synthesized
aagaaaaguugccgaagau

SEQ ID NO: 73657 - RNA, 19 nt, Artificial Sequence
  Chemically synthesized
gaaacugcuccagcuccaa

SEQ ID NO: 73658 - RNA, 19 nt, Artificial Sequence
  Chemically synthesized
agguuaugcuccuggcaca

SEQ ID NO: 73659 - RNA, 19 nt, Artificial Sequence
  Chemically synthesized
cuuuguuccugcuuucucu

SEQ ID NO: 73660 - RNA, 19 nt, Artificial Sequence
  Chemically synthesized
ugacaauauacacggauua

SEQ ID NO: 73661 - RNA, 19 nt, Artificial Sequence
  Chemically synthesized
aaaugcuaggccuguagua

SEQ ID NO: 73662 - RNA, 19 nt, Artificial Sequence
  Chemically synthesized
ggaucgggaagguuaugcu

SEQ ID NO: 73663 - RNA, 19 nt, Artificial Sequence
  Chemically synthesized
aggacaucaucaccuugga

SEQ ID NO: 73664 - RNA, 19 nt, Artificial Sequence
  Chemically synthesized
ccacaggaggugugauaga

SEQ ID NO: 73665 - RNA, 19 nt, Artificial Sequence
  Chemically synthesized
ggucccuagcaaaaugcua

SEQ ID NO: 73666 - RNA, 19 nt, Artificial Sequence
  Chemically synthesized
aaucaaccugcacuucaua

SEQ ID NO: 73667 - RNA, 19 nt, Artificial Sequence
  Chemically synthesized
ucagagaaggccaggaaga

SEQ ID NO: 73668 - RNA, 19 nt, Artificial Sequence
  Chemically synthesized
cagaauguggaacuccuca

SEQ ID NO: 73669 - RNA, 19 nt, Artificial Sequence
  Chemically synthesized
cuuucuuccuccagucugu

SEQ ID NO: 73670 - RNA, 19 nt, Artificial Sequence
  Chemically synthesized
cuuugggucgacauaguau

SEQ ID NO: 73671 - RNA, 19 nt, Artificial Sequence
  Chemically synthesized
aacucuucaccuugguuua

SEQ ID NO: 73672 - RNA, 19 nt, Artificial Sequence
  Chemically synthesized
ccaacauugccuugcauuu

SEQ ID NO: 73673 - RNA, 19 nt, Artificial Sequence
  Chemically synthesized
ucucccuucuuuaccuuca

SEQ ID NO: 73674 - RNA, 19 nt, Artificial Sequence
  Chemically synthesized
uuuugaugccuucugugaa

SEQ ID NO: 73675 - RNA, 19 nt, Artificial Sequence
  Chemically synthesized
aaacaugacuagagacgca

SEQ ID NO: 73676 - RNA, 19 nt, Artificial Sequence
  Chemically synthesized
uauucaccaucauguacca

SEQ ID NO: 73677 - RNA, 19 nt, Artificial Sequence
  Chemically synthesized
uggaaaugagggagcucau

SEQ ID NO: 73678 - RNA, 19 nt, Artificial Sequence
  Chemically synthesized
uguggaccacaguacucua

SEQ ID NO: 73679 - RNA, 19 nt, Artificial Sequence
  Chemically synthesized
gccaaagugggcaguuuca

SEQ ID NO: 73680 - RNA, 19 nt, Artificial Sequence
  Chemically synthesized
acauugccuugcauuugua

SEQ ID NO: 73681 - RNA, 19 nt, Artificial Sequence
  Chemically synthesized
caggauauugggagugugu

SEQ ID NO: 73682 - RNA, 19 nt, Artificial Sequence
  Chemically synthesized
cugagagaccaucuccuau

SEQ ID NO: 73683 - RNA, 19 nt, Artificial Sequence
  Chemically synthesized
uccugagaaacguccaucu

SEQ ID NO: 73684 - RNA, 19 nt, Artificial Sequence
  Chemically synthesized
cuuacuauucccacuuuca

SEQ ID NO: 73685 - RNA, 19 nt, Artificial Sequence
  Chemically synthesized
gcuuuuauuucagugccau

SEQ ID NO: 73686 - RNA, 19 nt, Artificial Sequence
  Chemically synthesized
gagaaacguccaucucucu

SEQ ID NO: 73687 - RNA, 19 nt, Artificial Sequence
  Chemically synthesized
agacauaucaugugugaga

SEQ ID NO: 73688 - RNA, 19 nt, Artificial Sequence
  Chemically synthesized
auagugggccuucauuaaa

SEQ ID NO: 73689 - RNA, 19 nt, Artificial Sequence
  Chemically synthesized
ugguguugagcaaugugca

SEQ ID NO: 73690 - RNA, 19 nt, Artificial Sequence
  Chemically synthesized
agaaggcaagccaaccuua

SEQ ID NO: 73691 - RNA, 19 nt, Artificial Sequence
  Chemically synthesized
guguggaugggaaacugcu

SEQ ID NO: 73692 - RNA, 19 nt, Artificial Sequence
  Chemically synthesized
caucauguaccaagugcuu

SEQ ID NO: 73693 - RNA, 19 nt, Artificial Sequence
  Chemically synthesized
agauggaaagaaccacgca

SEQ ID NO: 73694 - RNA, 19 nt, Artificial Sequence
  Chemically synthesized
caguauuaaacucuccuuu

SEQ ID NO: 73695 - RNA, 19 nt, Artificial Sequence
  Chemically synthesized
uuguuugggugguuuguga

SEQ ID NO: 73696 - RNA, 19 nt, Artificial Sequence
  Chemically synthesized
gaaacugcagaauuuugca

SEQ ID NO: 73697 - RNA, 19 nt, Artificial Sequence
  Chemically synthesized
uguguggcaugcauccuca

SEQ ID NO: 73698 - RNA, 19 nt, Artificial Sequence
  Chemically synthesized
auuuuuagcuccuugaaga

SEQ ID NO: 73699 - RNA, 19 nt, Artificial Sequence
  Chemically synthesized
uggagaugagacugaucgu

SEQ ID NO: 73700 - RNA, 19 nt, Artificial Sequence
  Chemically synthesized
uuaugcuccuggcacagaa

SEQ ID NO: 73701 - RNA, 19 nt, Artificial Sequence
  Chemically synthesized
uggaccuauugccaggaau

SEQ ID NO: 73702 - RNA, 19 nt, Artificial Sequence
  Chemically synthesized
caucucucucccuuacuau

SEQ ID NO: 73703 - RNA, 19 nt, Artificial Sequence
  Chemically synthesized
ggcuuuuauuucagugcca

SEQ ID NO: 73704 - RNA, 19 nt, Artificial Sequence
  Chemically synthesized
gccagcuccuuuucuguga

SEQ ID NO: 73705 - RNA, 19 nt, Artificial Sequence
  Chemically synthesized
caucuucuggagaaggaca

SEQ ID NO: 73706 - RNA, 19 nt, Artificial Sequence
  Chemically synthesized
aguauggaaguauuugaga

SEQ ID NO: 73707 - RNA, 19 nt, Artificial Sequence
  Chemically synthesized
cagugccauacauguuauu

SEQ ID NO: 73708 - RNA, 19 nt, Artificial Sequence
  Chemically synthesized
ucuagaauccugcuuuaca

SEQ ID NO: 73709 - RNA, 19 nt, Artificial Sequence
  Chemically synthesized
aaaugagggcagaaaccuu

SEQ ID NO: 73710 - RNA, 19 nt, Artificial Sequence
  Chemically synthesized
acuuguuuccugugcccau

SEQ ID NO: 73711 - RNA, 19 nt, Artificial Sequence
  Chemically synthesized
cuuccuucacaucucccau

SEQ ID NO: 73712 - RNA, 19 nt, Artificial Sequence
  Chemically synthesized
aaugguguguuucccuaga

SEQ ID NO: 73713 - RNA, 19 nt, Artificial Sequence
  Chemically synthesized
caaccuuagcuacaauccu

SEQ ID NO: 73714 - RNA, 19 nt, Artificial Sequence
  Chemically synthesized
gauuucuugcuaagcucca

SEQ ID NO: 73715 - RNA, 19 nt, Artificial Sequence
  Chemically synthesized
caaggagaugucugaauac

SEQ ID NO: 73716 - RNA, 19 nt, Artificial Sequence
  Chemically synthesized
cacggauuauuauuuguac

SEQ ID NO: 73717 - RNA, 19 nt, Artificial Sequence
  Chemically synthesized
gcuccaagagguuuuucag

SEQ ID NO: 73718 - RNA, 19 nt, Artificial Sequence
  Chemically synthesized
gaugugggaaucucccaga

SEQ ID NO: 73719 - RNA, 19 nt, Artificial Sequence
  Chemically synthesized
cguggagaugagacugauc

SEQ ID NO: 73720 - RNA, 19 nt, Artificial Sequence
  Chemically synthesized
acagaauuccaccggugca

SEQ ID NO: 73721 - RNA, 19 nt, Artificial Sequence
  Chemically synthesized
uucugagcgggcuugugau

SEQ ID NO: 73722 - RNA, 19 nt, Artificial Sequence
  Chemically synthesized
uggcaugcauccucaucau

SEQ ID NO: 73723 - RNA, 19 nt, Artificial Sequence
  Chemically synthesized
ucauccacgccaaguggaa

SEQ ID NO: 73724 - RNA, 19 nt, Artificial Sequence
  Chemically synthesized
caaagaucuuucguugguu

SEQ ID NO: 73725 - RNA, 19 nt, Artificial Sequence
  Chemically synthesized
agaugagacugaucguggg

SEQ ID NO: 73726 - RNA, 19 nt, Artificial Sequence
  Chemically synthesized
cugagaaacguccaucucu

SEQ ID NO: 73727 - RNA, 19 nt, Artificial Sequence
  Chemically synthesized
agagaaggccaggaagaau

SEQ ID NO: 73728 - RNA, 19 nt, Artificial Sequence
  Chemically synthesized
aguagucaaggugcucaau

SEQ ID NO: 73729 - RNA, 19 nt, Artificial Sequence
  Chemically synthesized
ucugagagaccaucuccua

SEQ ID NO: 73730 - RNA, 19 nt, Artificial Sequence
  Chemically synthesized
acgcgcucagacaugauau

SEQ ID NO: 73731 - RNA, 19 nt, Artificial Sequence
  Chemically synthesized
guuucagccagaaugugga

SEQ ID NO: 73732 - RNA, 19 nt, Artificial Sequence
  Chemically synthesized
agaagcaaacaugacuaga

SEQ ID NO: 73733 - RNA, 19 nt, Artificial Sequence
  Chemically synthesized
ggauauugggagugugugg

SEQ ID NO: 73734 - RNA, 19 nt, Artificial Sequence
  Chemically synthesized
cuuccugagaaacguccau

SEQ ID NO: 73735 - RNA, 19 nt, Artificial Sequence
  Chemically synthesized
cagaacaaaccaaaaaugu

SEQ ID NO: 73736 - RNA, 19 nt, Artificial Sequence
  Chemically synthesized
cuuccucaagucuugacaa

SEQ ID NO: 73737 - RNA, 19 nt, Artificial Sequence
  Chemically synthesized
ucugagcgggcuugugaua

SEQ ID NO: 73738 - RNA, 19 nt, Artificial Sequence
  Chemically synthesized
auuaucuuuuggcucugaa

SEQ ID NO: 73739 - RNA, 19 nt, Artificial Sequence
  Chemically synthesized
cuuuguuacugaaaugagc

SEQ ID NO: 73740 - RNA, 19 nt, Artificial Sequence
  Chemically synthesized
aaccuuuaucccugcuuau

SEQ ID NO: 73741 - RNA, 19 nt, Artificial Sequence
  Chemically synthesized
aucucccugcuucauaucu

SEQ ID NO: 73742 - RNA, 19 nt, Artificial Sequence
  Chemically synthesized
cauggucccuagcaaaaug

SEQ ID NO: 73743 - RNA, 19 nt, Artificial Sequence
  Chemically synthesized
gaaacuucccaacuucccu

SEQ ID NO: 73744 - RNA, 19 nt, Artificial Sequence
  Chemically synthesized
guaccaagugcuuggcaca

SEQ ID NO: 73745 - RNA, 19 nt, Artificial Sequence
  Chemically synthesized
agagugaugccgguaaaga

SEQ ID NO: 73746 - RNA, 19 nt, Artificial Sequence
  Chemically synthesized
cacugccaggauuuuguau

SEQ ID NO: 73747 - RNA, 19 nt, Artificial Sequence
  Chemically synthesized
uauucccacuuucauucaa

SEQ ID NO: 73748 - RNA, 19 nt, Artificial Sequence
  Chemically synthesized
cccauggaagucucaaaga

SEQ ID NO: 73749 - RNA, 19 nt, Artificial Sequence
  Chemically synthesized
gaagguuaugcuccuggca

SEQ ID NO: 73750 - RNA, 19 nt, Artificial Sequence
  Chemically synthesized
guuuggaagguguccaaau

SEQ ID NO: 73751 - RNA, 19 nt, Artificial Sequence
  Chemically synthesized
guguucaguuccagcuuuu

SEQ ID NO: 73752 - RNA, 19 nt, Artificial Sequence
  Chemically synthesized
gagagugaugccgguaaag

SEQ ID NO: 73753 - RNA, 19 nt, Artificial Sequence
  Chemically synthesized
ugaucuuugcccauggaag

SEQ ID NO: 73754 - RNA, 19 nt, Artificial Sequence
  Chemically synthesized
guggcaugcauccucauca

SEQ ID NO: 73755 - RNA, 19 nt, Artificial Sequence
  Chemically synthesized
gagagagagaaccuuucca

SEQ ID NO: 73756 - RNA, 19 nt, Artificial Sequence
  Chemically synthesized
gacaauauacacggauuau

SEQ ID NO: 73757 - RNA, 19 nt, Artificial Sequence
  Chemically synthesized
uggaaagaaccacgcagga

SEQ ID NO: 73758 - RNA, 19 nt, Artificial Sequence
  Chemically synthesized
caugcggaacaccaaacga

SEQ ID NO: 73759 - RNA, 19 nt, Artificial Sequence
  Chemically synthesized
gagugagaguuuggaaggu

SEQ ID NO: 73760 - RNA, 19 nt, Artificial Sequence
  Chemically synthesized
guguggcaugcauccucau

SEQ ID NO: 73761 - RNA, 19 nt, Artificial Sequence
  Chemically synthesized
ucuucaccuugguuuauga

SEQ ID NO: 73762 - RNA, 19 nt, Artificial Sequence
  Chemically synthesized
uguuucagcugcaguugaa

SEQ ID NO: 73763 - RNA, 19 nt, Artificial Sequence
  Chemically synthesized
aguuuggaagguguccaaa

SEQ ID NO: 73764 - RNA, 19 nt, Artificial Sequence
  Chemically synthesized
ggaaucucccagacuuguu

SEQ ID NO: 73765 - RNA, 19 nt, Artificial Sequence
  Chemically synthesized
cauucuuucuuccuccagu

SEQ ID NO: 73766 - RNA, 19 nt, Artificial Sequence
  Chemically synthesized
aaaaguugccgaagaugag

SEQ ID NO: 73767 - RNA, 19 nt, Artificial Sequence
  Chemically synthesized
cuuuugaugccuucuguga

SEQ ID NO: 73768 - RNA, 19 nt, Artificial Sequence
  Chemically synthesized
cacgcgcucagacaugaua

SEQ ID NO: 73769 - RNA, 19 nt, Artificial Sequence
  Chemically synthesized
uuauccacuggcauuuuua

SEQ ID NO: 73770 - RNA, 19 nt, Artificial Sequence
  Chemically synthesized
ucagugccauacauguuau

SEQ ID NO: 73771 - RNA, 19 nt, Artificial Sequence
  Chemically synthesized
cuucuuuaccuucauuuca

SEQ ID NO: 73772 - RNA, 19 nt, Artificial Sequence
  Chemically synthesized
aaaugagggagcucaucca

SEQ ID NO: 73773 - RNA, 19 nt, Artificial Sequence
  Chemically synthesized
ccuugaagacauaucaugu

SEQ ID NO: 73774 - RNA, 19 nt, Artificial Sequence
  Chemically synthesized
gaccacaggaggugugaua

SEQ ID NO: 73775 - RNA, 19 nt, Artificial Sequence
  Chemically synthesized
ccuuuaucccugcuuaucu

SEQ ID NO: 73776 - RNA, 19 nt, Artificial Sequence
  Chemically synthesized
gcccaucaucucugccuuu

SEQ ID NO: 73777 - RNA, 19 nt, Artificial Sequence
  Chemically synthesized
agacaugauaugcggcuau

SEQ ID NO: 73778 - RNA, 19 nt, Artificial Sequence
  Chemically synthesized
uuuuuguccuagagugaga

SEQ ID NO: 73779 - RNA, 19 nt, Artificial Sequence
  Chemically synthesized
uauggaaguauuugagaga

SEQ ID NO: 73780 - RNA, 19 nt, Artificial Sequence
  Chemically synthesized
ccuuccugagaaacgucca

SEQ ID NO: 73781 - RNA, 19 nt, Artificial Sequence
  Chemically synthesized
ccuaccaggcuguaaauga

SEQ ID NO: 73782 - RNA, 19 nt, Artificial Sequence
  Chemically synthesized
uaucucccugcuucauauc

SEQ ID NO: 73783 - RNA, 19 nt, Artificial Sequence
  Chemically synthesized
ucuuuuuccuuccugagaa

SEQ ID NO: 73784 - RNA, 19 nt, Artificial Sequence
  Chemically synthesized
cugugcguucccuucagua

SEQ ID NO: 73785 - RNA, 19 nt, Artificial Sequence
  Chemically synthesized
uucaguuccagcuuuugua

SEQ ID NO: 73786 - RNA, 19 nt, Artificial Sequence
  Chemically synthesized
ccuucacaucucccauggu

SEQ ID NO: 73787 - RNA, 19 nt, Artificial Sequence
  Chemically synthesized
gucuuuuuccuuccugaga

SEQ ID NO: 73788 - RNA, 19 nt, Artificial Sequence
  Chemically synthesized
gaaagaacuggaauuucgc

SEQ ID NO: 73789 - RNA, 19 nt, Artificial Sequence
  Chemically synthesized
cagaauuuugcacaguuac

SEQ ID NO: 73790 - RNA, 19 nt, Artificial Sequence
  Chemically synthesized
uguaaaugagggcagaaac

SEQ ID NO: 73791 - RNA, 19 nt, Artificial Sequence
  Chemically synthesized
uguuucccuagacucugua

SEQ ID NO: 73792 - RNA, 19 nt, Artificial Sequence
  Chemically synthesized
uuuugacaauauacacgga

SEQ ID NO: 73793 - RNA, 19 nt, Artificial Sequence
  Chemically synthesized
cucugaagaagcaaacaug

SEQ ID NO: 73794 - RNA, 19 nt, Artificial Sequence
  Chemically synthesized
agucuguucucacauaaca

SEQ ID NO: 73795 - RNA, 19 nt, Artificial Sequence
  Chemically synthesized
cccauauuuguguucaguu

SEQ ID NO: 73796 - RNA, 19 nt, Artificial Sequence
  Chemically synthesized
cuggaauuucgcucuggag

SEQ ID NO: 73797 - RNA, 19 nt, Artificial Sequence
  Chemically synthesized
acugcccaagccuacagaa

SEQ ID NO: 73798 - RNA, 19 nt, Artificial Sequence
  Chemically synthesized
augugcacuucacuggaga

SEQ ID NO: 73799 - RNA, 19 nt, Artificial Sequence
  Chemically synthesized
cguucccuucaguacugca

SEQ ID NO: 73800 - RNA, 19 nt, Artificial Sequence
  Chemically synthesized
aggaaaugcaagagaaacu

SEQ ID NO: 73801 - RNA, 19 nt, Artificial Sequence
  Chemically synthesized
cauuuuuagcuccuugaag

SEQ ID NO: 73802 - RNA, 19 nt, Artificial Sequence
  Chemically synthesized
cucuccuuugauauuaugu

SEQ ID NO: 73803 - RNA, 19 nt, Artificial Sequence
  Chemically synthesized
gugggaaucucccagacuu

SEQ ID NO: 73804 - RNA, 19 nt, Artificial Sequence
  Chemically synthesized
cgcgcucagacaugauaug

SEQ ID NO: 73805 - RNA, 19 nt, Artificial Sequence
  Chemically synthesized
agcgggcuugugauaugca

SEQ ID NO: 73806 - RNA, 19 nt, Artificial Sequence
  Chemically synthesized
gaaccuuuccacucccacu

SEQ ID NO: 73807 - RNA, 19 nt, Artificial Sequence
  Chemically synthesized
auugccaucgggugccaaa

SEQ ID NO: 73808 - RNA, 19 nt, Artificial Sequence
  Chemically synthesized
cagccaacauugccuugca

SEQ ID NO: 73809 - RNA, 19 nt, Artificial Sequence
  Chemically synthesized
gaccaacaagauggaaaga

SEQ ID NO: 73810 - RNA, 19 nt, Artificial Sequence
  Chemically synthesized
cauggaagucucaaagauc

SEQ ID NO: 73811 - RNA, 19 nt, Artificial Sequence
  Chemically synthesized
caaccugcacuucauaucu

SEQ ID NO: 73812 - RNA, 19 nt, Artificial Sequence
  Chemically synthesized
aggccaggaagaauggugu

SEQ ID NO: 73813 - RNA, 19 nt, Artificial Sequence
  Chemically synthesized
acuucacuggagagaaaga

SEQ ID NO: 73814 - RNA, 19 nt, Artificial Sequence
  Chemically synthesized
cauguucuaugugaccaga

SEQ ID NO: 73815 - RNA, 19 nt, Artificial Sequence
  Chemically synthesized
uguucuaugugaccagacu

SEQ ID NO: 73816 - RNA, 19 nt, Artificial Sequence
  Chemically synthesized
gagccuuugaucuucagga

SEQ ID NO: 73817 - RNA, 19 nt, Artificial Sequence
  Chemically synthesized
gcuaggccuguaguaguca

SEQ ID NO: 73818 - RNA, 19 nt, Artificial Sequence
  Chemically synthesized
caagccaaccuuagcuaca

SEQ ID NO: 73819 - RNA, 19 nt, Artificial Sequence
  Chemically synthesized
auauuuguguucaguucca

SEQ ID NO: 73820 - RNA, 19 nt, Artificial Sequence
  Chemically synthesized
aguauuaaacucuccuuug

SEQ ID NO: 73821 - RNA, 19 nt, Artificial Sequence
  Chemically synthesized
uguccuagagugagaguuu

SEQ ID NO: 73822 - RNA, 19 nt, Artificial Sequence
  Chemically synthesized
cuuauugaucuuugcccau

SEQ ID NO: 73823 - RNA, 19 nt, Artificial Sequence
  Chemically synthesized
gagcaaugugcacuucacu

SEQ ID NO: 73824 - RNA, 19 nt, Artificial Sequence
  Chemically synthesized
caagcuuuugggcuaugac

SEQ ID NO: 73825 - RNA, 19 nt, Artificial Sequence
  Chemically synthesized
gaaugguguguuucccuag

SEQ ID NO: 73826 - RNA, 19 nt, Artificial Sequence
  Chemically synthesized
aucuuuuggcucugaagaa

SEQ ID NO: 73827 - RNA, 19 nt, Artificial Sequence
  Chemically synthesized
cuccuuugauauuaugugg

SEQ ID NO: 73828 - RNA, 19 nt, Artificial Sequence
  Chemically synthesized
ugagaaacguccaucucuc

SEQ ID NO: 73829 - RNA, 19 nt, Artificial Sequence
  Chemically synthesized
acauaucaugugugagaua

SEQ ID NO: 73830 - RNA, 19 nt, Artificial Sequence
  Chemically synthesized
cagccugucagccaacauu

SEQ ID NO: 73831 - RNA, 19 nt, Artificial Sequence
  Chemically synthesized
guugaccaacaagauggaa

SEQ ID NO: 73832 - RNA, 19 nt, Artificial Sequence
  Chemically synthesized
cucaaagauguaauguagu

SEQ ID NO: 73833 - RNA, 19 nt, Artificial Sequence
  Chemically synthesized
cuuccuagcuuaucucccu

SEQ ID NO: 73834 - RNA, 19 nt, Artificial Sequence
  Chemically synthesized
gggcuugugauaugcacgu

SEQ ID NO: 73835 - RNA, 19 nt, Artificial Sequence
  Chemically synthesized
uaaagaagggagagauaug

SEQ ID NO: 73836 - RNA, 19 nt, Artificial Sequence
  Chemically synthesized
auaugaagcagggagauaa

SEQ ID NO: 73837 - RNA, 19 nt, Artificial Sequence
  Chemically synthesized
agagauaugaagcagggag

SEQ ID NO: 73838 - RNA, 19 nt, Artificial Sequence
  Chemically synthesized
gaagggagagauaugaagc

SEQ ID NO: 73839 - RNA, 19 nt, Artificial Sequence
  Chemically synthesized
uuaaugaaggcccacuaug

SEQ ID NO: 73840 - RNA, 19 nt, Artificial Sequence
  Chemically synthesized
uuaaagaacagggaaguug

SEQ ID NO: 73841 - RNA, 19 nt, Artificial Sequence
  Chemically synthesized
uaaaauucaggagugcaag

SEQ ID NO: 73842 - RNA, 19 nt, Artificial Sequence
  Chemically synthesized
ucagacaucuccuugcacc

SEQ ID NO: 73843 - RNA, 19 nt, Artificial Sequence
  Chemically synthesized
uuucuuuaccggcaucacu

SEQ ID NO: 73844 - RNA, 19 nt, Artificial Sequence
  Chemically synthesized
uuggcuugccuucuucccu

SEQ ID NO: 73845 - RNA, 19 nt, Artificial Sequence
  Chemically synthesized
uuuauugagcaccuugacu

SEQ ID NO: 73846 - RNA, 19 nt, Artificial Sequence
  Chemically synthesized
uaagggagagagauggacg

SEQ ID NO: 73847 - RNA, 19 nt, Artificial Sequence
  Chemically synthesized
uaaagaacagggaaguugg

SEQ ID NO: 73848 - RNA, 19 nt, Artificial Sequence
  Chemically synthesized
gggagagauaugaagcagg

SEQ ID NO: 73849 - RNA, 19 nt, Artificial Sequence
  Chemically synthesized
uuacagagucuagggaaac

SEQ ID NO: 73850 - RNA, 19 nt, Artificial Sequence
  Chemically synthesized
augaagguaaagaagggag

SEQ ID NO: 73851 - RNA, 19 nt, Artificial Sequence
  Chemically synthesized
aagggagagauaugaagca

SEQ ID NO: 73852 - RNA, 19 nt, Artificial Sequence
  Chemically synthesized
uuccaaacucucacucuag

SEQ ID NO: 73853 - RNA, 19 nt, Artificial Sequence
  Chemically synthesized
cauaauaucaaaggagagu

SEQ ID NO: 73854 - RNA, 19 nt, Artificial Sequence
  Chemically synthesized
auuuauuuggcacccgaug

SEQ ID NO: 73855 - RNA, 19 nt, Artificial Sequence
  Chemically synthesized
ucaggaaggaaaaagacag

SEQ ID NO: 73856 - RNA, 19 nt, Artificial Sequence
  Chemically synthesized
uuagcaagaaaucaccauu

SEQ ID NO: 73857 - RNA, 19 nt, Artificial Sequence
  Chemically synthesized
uugccuucuucccucuuuu

SEQ ID NO: 73858 - RNA, 19 nt, Artificial Sequence
  Chemically synthesized
uugcauuuccugugcaguc

SEQ ID NO: 73859 - RNA, 19 nt, Artificial Sequence
  Chemically synthesized
agguaaagaagggagagau

SEQ ID NO: 73860 - RNA, 19 nt, Artificial Sequence
  Chemically synthesized
agggagagauaugaagcag

SEQ ID NO: 73861 - RNA, 19 nt, Artificial Sequence
  Chemically synthesized
uuggacaccuuccaaacuc

SEQ ID NO: 73862 - RNA, 19 nt, Artificial Sequence
  Chemically synthesized
guaaagaagggagagauau

SEQ ID NO: 73863 - RNA, 19 nt, Artificial Sequence
  Chemically synthesized
aagguaaagaagggagaga

SEQ ID NO: 73864 - RNA, 19 nt, Artificial Sequence
  Chemically synthesized
ucuagauaugaagugcagg

SEQ ID NO: 73865 - RNA, 19 nt, Artificial Sequence
  Chemically synthesized
uugaagagggugacuagag

SEQ ID NO: 73866 - RNA, 19 nt, Artificial Sequence
  Chemically synthesized
uauggcacugaaauaaaag

SEQ ID NO: 73867 - RNA, 19 nt, Artificial Sequence
  Chemically synthesized
uucuggacacugcagcaag

SEQ ID NO: 73868 - RNA, 19 nt, Artificial Sequence
  Chemically synthesized
uucccgauccuugauaagu

SEQ ID NO: 73869 - RNA, 19 nt, Artificial Sequence
  Chemically synthesized
auccacaccauagauggcg

SEQ ID NO: 73870 - RNA, 19 nt, Artificial Sequence
  Chemically synthesized
uccagugaagugcacauug

SEQ ID NO: 73871 - RNA, 19 nt, Artificial Sequence
  Chemically synthesized
uuuccugaugaugaggaug

SEQ ID NO: 73872 - RNA, 19 nt, Artificial Sequence
  Chemically synthesized
augaagcagggagauaagc

SEQ ID NO: 73873 - RNA, 19 nt, Artificial Sequence
  Chemically synthesized
ucacucuaggacaaaaagg

SEQ ID NO: 73874 - RNA, 19 nt, Artificial Sequence
  Chemically synthesized
uuaccggcaucacucuccu

SEQ ID NO: 73875 - RNA, 19 nt, Artificial Sequence
  Chemically synthesized
aagaagggagagauaugaa

SEQ ID NO: 73876 - RNA, 19 nt, Artificial Sequence
  Chemically synthesized
uccaucuuguuggucaacc

SEQ ID NO: 73877 - RNA, 19 nt, Artificial Sequence
  Chemically synthesized
ugaagcagggagauaagcu

SEQ ID NO: 73878 - RNA, 19 nt, Artificial Sequence
  Chemically synthesized
uccagagcgaaauuccagu

SEQ ID NO: 73879 - RNA, 19 nt, Artificial Sequence
  Chemically synthesized
ucagacaucuuaacuaaug

SEQ ID NO: 73880 - RNA, 19 nt, Artificial Sequence
  Chemically synthesized
uucagacaucuccuugcac

SEQ ID NO: 73881 - RNA, 19 nt, Artificial Sequence
  Chemically synthesized
ugcauccugaagaucaaag

SEQ ID NO: 73882 - RNA, 19 nt, Artificial Sequence
  Chemically synthesized
uuucucaggaaggaaaaag

SEQ ID NO: 73883 - RNA, 19 nt, Artificial Sequence
  Chemically synthesized
ucauguuugcuucuucaga

SEQ ID NO: 73884 - RNA, 19 nt, Artificial Sequence
  Chemically synthesized
ucucucagacaucuuaacu

SEQ ID NO: 73885 - RNA, 19 nt, Artificial Sequence
  Chemically synthesized
cugaugaugaggaugcaug

SEQ ID NO: 73886 - RNA, 19 nt, Artificial Sequence
  Chemically synthesized
ucuaacaauucgcucaaca

SEQ ID NO: 73887 - RNA, 19 nt, Artificial Sequence
  Chemically synthesized
ugcguucaccuuaaccagc

SEQ ID NO: 73888 - RNA, 19 nt, Artificial Sequence
  Chemically synthesized
ucuuaggcagcaaguugag

SEQ ID NO: 73889 - RNA, 19 nt, Artificial Sequence
  Chemically synthesized
ucgauguaccaggaaccuc

SEQ ID NO: 73890 - RNA, 19 nt, Artificial Sequence
  Chemically synthesized
ugugagaacagacuggagg

SEQ ID NO: 73891 - RNA, 19 nt, Artificial Sequence
  Chemically synthesized
uccaaacucucacucuagg

SEQ ID NO: 73892 - RNA, 19 nt, Artificial Sequence
  Chemically synthesized
ugcaguauucagacaucuc

SEQ ID NO: 73893 - RNA, 19 nt, Artificial Sequence
  Chemically synthesized
uggagucccacacucaaag

SEQ ID NO: 73894 - RNA, 19 nt, Artificial Sequence
  Chemically synthesized
ggagagauaugaagcaggg

SEQ ID NO: 73895 - RNA, 19 nt, Artificial Sequence
  Chemically synthesized
uucacagaaaaggagcugg

SEQ ID NO: 73896 - RNA, 19 nt, Artificial Sequence
  Chemically synthesized
acagaaaccgugcauccug

SEQ ID NO: 73897 - RNA, 19 nt, Artificial Sequence
  Chemically synthesized
aacaauucgcucaacaaca

SEQ ID NO: 73898 - RNA, 19 nt, Artificial Sequence
  Chemically synthesized
gagauaugaagcagggaga

SEQ ID NO: 73899 - RNA, 19 nt, Artificial Sequence
  Chemically synthesized
uuggcagcaaggcucacaa

SEQ ID NO: 73900 - RNA, 19 nt, Artificial Sequence
  Chemically synthesized
cuugucaggcucuucaacu

SEQ ID NO: 73901 - RNA, 19 nt, Artificial Sequence
  Chemically synthesized
aguggaaagguucucucuc

SEQ ID NO: 73902 - RNA, 19 nt, Artificial Sequence
  Chemically synthesized
uagccgcauaucaugucug

SEQ ID NO: 73903 - RNA, 19 nt, Artificial Sequence
  Chemically synthesized
acagagucuagggaaacac

SEQ ID NO: 73904 - RNA, 19 nt, Artificial Sequence
  Chemically synthesized
acaccuuccaaacucucac

SEQ ID NO: 73905 - RNA, 19 nt, Artificial Sequence
  Chemically synthesized
uguguuuacaacuucacuu

SEQ ID NO: 73906 - RNA, 19 nt, Artificial Sequence
  Chemically synthesized
ccucuuaggcagcaaguug

SEQ ID NO: 73907 - RNA, 19 nt, Artificial Sequence
  Chemically synthesized
ucaaagagcugaaaaaccu

SEQ ID NO: 73908 - RNA, 19 nt, Artificial Sequence
  Chemically synthesized
aucuucggcaacuuuucuu

SEQ ID NO: 73909 - RNA, 19 nt, Artificial Sequence
  Chemically synthesized
uuggagcuggagcaguuuc

SEQ ID NO: 73910 - RNA, 19 nt, Artificial Sequence
  Chemically synthesized
ugugccaggagcauaaccu

SEQ ID NO: 73911 - RNA, 19 nt, Artificial Sequence
  Chemically synthesized
agagaaagcaggaacaaag

SEQ ID NO: 73912 - RNA, 19 nt, Artificial Sequence
  Chemically synthesized
uaauccguguauauuguca

SEQ ID NO: 73913 - RNA, 19 nt, Artificial Sequence
  Chemically synthesized
uacuacaggccuagcauuu

SEQ ID NO: 73914 - RNA, 19 nt, Artificial Sequence
  Chemically synthesized
agcauaaccuucccgaucc

SEQ ID NO: 73915 - RNA, 19 nt, Artificial Sequence
  Chemically synthesized
uccaaggugaugauguccu

SEQ ID NO: 73916 - RNA, 19 nt, Artificial Sequence
  Chemically synthesized
ucuaucacaccuccugugg

SEQ ID NO: 73917 - RNA, 19 nt, Artificial Sequence
  Chemically synthesized
uagcauuuugcuagggacc

SEQ ID NO: 73918 - RNA, 19 nt, Artificial Sequence
  Chemically synthesized
uaugaagugcagguugauu

SEQ ID NO: 73919 - RNA, 19 nt, Artificial Sequence
  Chemically synthesized
ucuuccuggccuucucuga

SEQ ID NO: 73920 - RNA, 19 nt, Artificial Sequence
  Chemically synthesized
ugaggaguuccacauucug

SEQ ID NO: 73921 - RNA, 19 nt, Artificial Sequence
  Chemically synthesized
acagacuggaggaagaaag

SEQ ID NO: 73922 - RNA, 19 nt, Artificial Sequence
  Chemically synthesized
auacuaugucgacccaaag

SEQ ID NO: 73923 - RNA, 19 nt, Artificial Sequence
  Chemically synthesized
uaaaccaaggugaagaguu

SEQ ID NO: 73924 - RNA, 19 nt, Artificial Sequence
  Chemically synthesized
aaaugcaaggcaauguugg

SEQ ID NO: 73925 - RNA, 19 nt, Artificial Sequence
  Chemically synthesized
ugaagguaaagaagggaga

SEQ ID NO: 73926 - RNA, 19 nt, Artificial Sequence
  Chemically synthesized
uucacagaaggcaucaaaa

SEQ ID NO: 73927 - RNA, 19 nt, Artificial Sequence
  Chemically synthesized
ugcgucucuagucauguuu

SEQ ID NO: 73928 - RNA, 19 nt, Artificial Sequence
  Chemically synthesized
ugguacaugauggugaaua

SEQ ID NO: 73929 - RNA, 19 nt, Artificial Sequence
  Chemically synthesized
augagcucccucauuucca

SEQ ID NO: 73930 - RNA, 19 nt, Artificial Sequence
  Chemically synthesized
uagaguacugugguccaca

SEQ ID NO: 73931 - RNA, 19 nt, Artificial Sequence
  Chemically synthesized
ugaaacugcccacuuuggc

SEQ ID NO: 73932 - RNA, 19 nt, Artificial Sequence
  Chemically synthesized
uacaaaugcaaggcaaugu

SEQ ID NO: 73933 - RNA, 19 nt, Artificial Sequence
  Chemically synthesized
acacacucccaauauccug

SEQ ID NO: 73934 - RNA, 19 nt, Artificial Sequence
  Chemically synthesized
auaggagauggucucucag

SEQ ID NO: 73935 - RNA, 19 nt, Artificial Sequence
  Chemically synthesized
agauggacguuucucagga

SEQ ID NO: 73936 - RNA, 19 nt, Artificial Sequence
  Chemically synthesized
ugaaagugggaauaguaag

SEQ ID NO: 73937 - RNA, 19 nt, Artificial Sequence
  Chemically synthesized
auggcacugaaauaaaagc

SEQ ID NO: 73938 - RNA, 19 nt, Artificial Sequence
  Chemically synthesized
agagagauggacguuucuc

SEQ ID NO: 73939 - RNA, 19 nt, Artificial Sequence
  Chemically synthesized
ucucacacaugauaugucu

SEQ ID NO: 73940 - RNA, 19 nt, Artificial Sequence
  Chemically synthesized
uuuaaugaaggcccacuau

SEQ ID NO: 73941 - RNA, 19 nt, Artificial Sequence
  Chemically synthesized
ugcacauugcucaacacca

SEQ ID NO: 73942 - RNA, 19 nt, Artificial Sequence
  Chemically synthesized
uaagguuggcuugccuucu

SEQ ID NO: 73943 - RNA, 19 nt, Artificial Sequence
  Chemically synthesized
agcaguuucccauccacac

SEQ ID NO: 73944 - RNA, 19 nt, Artificial Sequence
  Chemically synthesized
aagcacuugguacaugaug

SEQ ID NO: 73945 - RNA, 19 nt, Artificial Sequence
  Chemically synthesized
ugcgugguucuuuccaucu

SEQ ID NO: 73946 - RNA, 19 nt, Artificial Sequence
  Chemically synthesized
aaaggagaguuuaauacug

SEQ ID NO: 73947 - RNA, 19 nt, Artificial Sequence
  Chemically synthesized
ucacaaaccacccaaacaa

SEQ ID NO: 73948 - RNA, 19 nt, Artificial Sequence
  Chemically synthesized
ugcaaaauucugcaguuuc

SEQ ID NO: 73949 - RNA, 19 nt, Artificial Sequence
  Chemically synthesized
ugaggaugcaugccacaca

SEQ ID NO: 73950 - RNA, 19 nt, Artificial Sequence
  Chemically synthesized
ucuucaaggagcuaaaaau

SEQ ID NO: 73951 - RNA, 19 nt, Artificial Sequence
  Chemically synthesized
acgaucagucucaucucca

SEQ ID NO: 73952 - RNA, 19 nt, Artificial Sequence
  Chemically synthesized
uucugugccaggagcauaa

SEQ ID NO: 73953 - RNA, 19 nt, Artificial Sequence
  Chemically synthesized
auuccuggcaauaggucca

SEQ ID NO: 73954 - RNA, 19 nt, Artificial Sequence
  Chemically synthesized
auaguaagggagagagaug

SEQ ID NO: 73955 - RNA, 19 nt, Artificial Sequence
  Chemically synthesized
uggcacugaaauaaaagcc

SEQ ID NO: 73956 - RNA, 19 nt, Artificial Sequence
  Chemically synthesized
ucacagaaaaggagcuggc

SEQ ID NO: 73957 - RNA, 19 nt, Artificial Sequence
  Chemically synthesized
uguccuucuccagaagaug

SEQ ID NO: 73958 - RNA, 19 nt, Artificial Sequence
  Chemically synthesized
ucucaaauacuuccauacu

SEQ ID NO: 73959 - RNA, 19 nt, Artificial Sequence
  Chemically synthesized
aauaacauguauggcacug

SEQ ID NO: 73960 - RNA, 19 nt, Artificial Sequence
  Chemically synthesized
uguaaagcaggauucuaga

SEQ ID NO: 73961 - RNA, 19 nt, Artificial Sequence
  Chemically synthesized
aagguuucugcccucauuu

SEQ ID NO: 73962 - RNA, 19 nt, Artificial Sequence
  Chemically synthesized
augggcacaggaaacaagu

SEQ ID NO: 73963 - RNA, 19 nt, Artificial Sequence
  Chemically synthesized
augggagaugugaaggaag

SEQ ID NO: 73964 - RNA, 19 nt, Artificial Sequence
  Chemically synthesized
ucuagggaaacacaccauu

SEQ ID NO: 73965 - RNA, 19 nt, Artificial Sequence
  Chemically synthesized
aggauuguagcuaagguug

SEQ ID NO: 73966 - RNA, 19 nt, Artificial Sequence
  Chemically synthesized
uggagcuuagcaagaaauc

SEQ ID NO: 73967 - RNA, 19 nt, Artificial Sequence
  Chemically synthesized
guauucagacaucuccuug

SEQ ID NO: 73968 - RNA, 19 nt, Artificial Sequence
  Chemically synthesized
guacaaauaauaauccgug

SEQ ID NO: 73969 - RNA, 19 nt, Artificial Sequence
  Chemically synthesized
cugaaaaaccucuuggagc

SEQ ID NO: 73970 - RNA, 19 nt, Artificial Sequence
  Chemically synthesized
ucugggagauucccacauc

SEQ ID NO: 73971 - RNA, 19 nt, Artificial Sequence
  Chemically synthesized
gaucagucucaucuccacg

SEQ ID NO: 73972 - RNA, 19 nt, Artificial Sequence
  Chemically synthesized
ugcaccgguggaauucugu

SEQ ID NO: 73973 - RNA, 19 nt, Artificial Sequence
  Chemically synthesized
aucacaagcccgcucagaa

SEQ ID NO: 73974 - RNA, 19 nt, Artificial Sequence
  Chemically synthesized
augaugaggaugcaugcca

SEQ ID NO: 73975 - RNA, 19 nt, Artificial Sequence
  Chemically synthesized
uuccacuuggcguggauga

SEQ ID NO: 73976 - RNA, 19 nt, Artificial Sequence
  Chemically synthesized
aaccaacgaaagaucuuug

SEQ ID NO: 73977 - RNA, 19 nt, Artificial Sequence
  Chemically synthesized
cccacgaucagucucaucu

SEQ ID NO: 73978 - RNA, 19 nt, Artificial Sequence
  Chemically synthesized
agagauggacguuucucag

SEQ ID NO: 73979 - RNA, 19 nt, Artificial Sequence
  Chemically synthesized
auucuuccuggccuucucu

SEQ ID NO: 73980 - RNA, 19 nt, Artificial Sequence
  Chemically synthesized
auugagcaccuugacuacu

SEQ ID NO: 73981 - RNA, 19 nt, Artificial Sequence
  Chemically synthesized
uaggagauggucucucaga

SEQ ID NO: 73982 - RNA, 19 nt, Artificial Sequence
  Chemically synthesized
auaucaugucugagcgcgu

SEQ ID NO: 73983 - RNA, 19 nt, Artificial Sequence
  Chemically synthesized
uccacauucuggcugaaac

SEQ ID NO: 73984 - RNA, 19 nt, Artificial Sequence
  Chemically synthesized
ucuagucauguuugcuucu

SEQ ID NO: 73985 - RNA, 19 nt, Artificial Sequence
  Chemically synthesized
ccacacacucccaauaucc

SEQ ID NO: 73986 - RNA, 19 nt, Artificial Sequence
  Chemically synthesized
auggacguuucucaggaag

SEQ ID NO: 73987 - RNA, 19 nt, Artificial Sequence
  Chemically synthesized
acauuuuugguuuguucug

SEQ ID NO: 73988 - RNA, 19 nt, Artificial Sequence
  Chemically synthesized
uugucaagacuugaggaag

SEQ ID NO: 73989 - RNA, 19 nt, Artificial Sequence
  Chemically synthesized
uaucacaagcccgcucaga

SEQ ID NO: 73990 - RNA, 19 nt, Artificial Sequence
  Chemically synthesized
uucagagccaaaagauaau

SEQ ID NO: 73991 - RNA, 19 nt, Artificial Sequence
  Chemically synthesized
gcucauuucaguaacaaag

SEQ ID NO: 73992 - RNA, 19 nt, Artificial Sequence
  Chemically synthesized
auaagcagggauaaagguu

SEQ ID NO: 73993 - RNA, 19 nt, Artificial Sequence
  Chemically synthesized
agauaugaagcagggagau

SEQ ID NO: 73994 - RNA, 19 nt, Artificial Sequence
  Chemically synthesized
cauuuugcuagggaccaug

SEQ ID NO: 73995 - RNA, 19 nt, Artificial Sequence
  Chemically synthesized
agggaaguugggaaguuuc

SEQ ID NO: 73996 - RNA, 19 nt, Artificial Sequence
  Chemically synthesized
ugugccaagcacuugguac

SEQ ID NO: 73997 - RNA, 19 nt, Artificial Sequence
  Chemically synthesized
ucuuuaccggcaucacucu

SEQ ID NO: 73998 - RNA, 19 nt, Artificial Sequence
  Chemically synthesized
auacaaaauccuggcagug

SEQ ID NO: 73999 - RNA, 19 nt, Artificial Sequence
  Chemically synthesized
uugaaugaaagugggaaua

SEQ ID NO: 74000 - RNA, 19 nt, Artificial Sequence
  Chemically synthesized
ucuuugagacuuccauggg

SEQ ID NO: 74001 - RNA, 19 nt, Artificial Sequence
  Chemically synthesized
ugccaggagcauaaccuuc

SEQ ID NO: 74002 - RNA, 19 nt, Artificial Sequence
  Chemically synthesized
auuuggacaccuuccaaac

SEQ ID NO: 74003 - RNA, 19 nt, Artificial Sequence
  Chemically synthesized
aaaagcuggaacugaacac

SEQ ID NO: 74004 - RNA, 19 nt, Artificial Sequence
  Chemically synthesized
cuuuaccggcaucacucuc

SEQ ID NO: 74005 - RNA, 19 nt, Artificial Sequence
  Chemically synthesized
cuuccaugggcaaagauca

SEQ ID NO: 74006 - RNA, 19 nt, Artificial Sequence
  Chemically synthesized
ugaugaggaugcaugccac

SEQ ID NO: 74007 - RNA, 19 nt, Artificial Sequence
  Chemically synthesized
uggaaagguucucucucuc

SEQ ID NO: 74008 - RNA, 19 nt, Artificial Sequence
  Chemically synthesized
auaauccguguauauuguc

SEQ ID NO: 74009 - RNA, 19 nt, Artificial Sequence
  Chemically synthesized
uccugcgugguucuuucca

SEQ ID NO: 74010 - RNA, 19 nt, Artificial Sequence
  Chemically synthesized
ucguuugguguuccgcaug

SEQ ID NO: 74011 - RNA, 19 nt, Artificial Sequence
  Chemically synthesized
accuuccaaacucucacuc

SEQ ID NO: 74012 - RNA, 19 nt, Artificial Sequence
  Chemically synthesized
augaggaugcaugccacac

SEQ ID NO: 74013 - RNA, 19 nt, Artificial Sequence
  Chemically synthesized
ucauaaaccaaggugaaga

SEQ ID NO: 74014 - RNA, 19 nt, Artificial Sequence
  Chemically synthesized
uucaacugcagcugaaaca

SEQ ID NO: 74015 - RNA, 19 nt, Artificial Sequence
  Chemically synthesized
uuuggacaccuuccaaacu

SEQ ID NO: 74016 - RNA, 19 nt, Artificial Sequence
  Chemically synthesized
aacaagucugggagauucc

SEQ ID NO: 74017 - RNA, 19 nt, Artificial Sequence
  Chemically synthesized
acuggaggaagaaagaaug

SEQ ID NO: 74018 - RNA, 19 nt, Artificial Sequence
  Chemically synthesized
cucaucuucggcaacuuuu

SEQ ID NO: 74019 - RNA, 19 nt, Artificial Sequence
  Chemically synthesized
ucacagaaggcaucaaaag

SEQ ID NO: 74020 - RNA, 19 nt, Artificial Sequence
  Chemically synthesized
uaucaugucugagcgcgug

SEQ ID NO: 74021 - RNA, 19 nt, Artificial Sequence
  Chemically synthesized
uaaaaaugccaguggauaa

SEQ ID NO: 74022 - RNA, 19 nt, Artificial Sequence
  Chemically synthesized
auaacauguauggcacuga

SEQ ID NO: 74023 - RNA, 19 nt, Artificial Sequence
  Chemically synthesized
ugaaaugaagguaaagaag

SEQ ID NO: 74024 - RNA, 19 nt, Artificial Sequence
  Chemically synthesized
uggaugagcucccucauuu

SEQ ID NO: 74025 - RNA, 19 nt, Artificial Sequence
  Chemically synthesized
acaugauaugucuucaagg

SEQ ID NO: 74026 - RNA, 19 nt, Artificial Sequence
  Chemically synthesized
uaucacaccuccugugguc

SEQ ID NO: 74027 - RNA, 19 nt, Artificial Sequence
  Chemically synthesized
agauaagcagggauaaagg

SEQ ID NO: 74028 - RNA, 19 nt, Artificial Sequence
  Chemically synthesized
aaaggcagagaugaugggc

SEQ ID NO: 74029 - RNA, 19 nt, Artificial Sequence
  Chemically synthesized
auagccgcauaucaugucu

SEQ ID NO: 74030 - RNA, 19 nt, Artificial Sequence
  Chemically synthesized
ucucacucuaggacaaaaa

SEQ ID NO: 74031 - RNA, 19 nt, Artificial Sequence
  Chemically synthesized
ucucucaaauacuuccaua

SEQ ID NO: 74032 - RNA, 19 nt, Artificial Sequence
  Chemically synthesized
uggacguuucucaggaagg

SEQ ID NO: 74033 - RNA, 19 nt, Artificial Sequence
  Chemically synthesized
ucauuuacagccugguagg

SEQ ID NO: 74034 - RNA, 19 nt, Artificial Sequence
  Chemically synthesized
gauaugaagcagggagaua

SEQ ID NO: 74035 - RNA, 19 nt, Artificial Sequence
  Chemically synthesized
uucucaggaaggaaaaaga

SEQ ID NO: 74036 - RNA, 19 nt, Artificial Sequence
  Chemically synthesized
uacugaagggaacgcacag

SEQ ID NO: 74037 - RNA, 19 nt, Artificial Sequence
  Chemically synthesized
uacaaaagcuggaacugaa

SEQ ID NO: 74038 - RNA, 19 nt, Artificial Sequence
  Chemically synthesized
accaugggagaugugaagg

SEQ ID NO: 74039 - RNA, 19 nt, Artificial Sequence
  Chemically synthesized
ucucaggaaggaaaaagac

SEQ ID NO: 74040 - RNA, 19 nt, Artificial Sequence
  Chemically synthesized
gcgaaauuccaguucuuuc

SEQ ID NO: 74041 - RNA, 19 nt, Artificial Sequence
  Chemically synthesized
guaacugugcaaaauucug

SEQ ID NO: 74042 - RNA, 19 nt, Artificial Sequence
  Chemically synthesized
guuucugcccucauuuaca

SEQ ID NO: 74043 - RNA, 19 nt, Artificial Sequence
  Chemically synthesized
uacagagucuagggaaaca

SEQ ID NO: 74044 - RNA, 19 nt, Artificial Sequence
  Chemically synthesized
uccguguauauugucaaaa

SEQ ID NO: 74045 - RNA, 19 nt, Artificial Sequence
  Chemically synthesized
cauguuugcuucuucagag

SEQ ID NO: 74046 - RNA, 19 nt, Artificial Sequence
  Chemically synthesized
uguuaugugagaacagacu

SEQ ID NO: 74047 - RNA, 19 nt, Artificial Sequence
  Chemically synthesized
aacugaacacaaauauggg

SEQ ID NO: 74048 - RNA, 19 nt, Artificial Sequence
  Chemically synthesized
cuccagagcgaaauuccag

SEQ ID NO: 74049 - RNA, 19 nt, Artificial Sequence
  Chemically synthesized
uucuguaggcuugggcagu

SEQ ID NO: 74050 - RNA, 19 nt, Artificial Sequence
  Chemically synthesized
ucuccagugaagugcacau

SEQ ID NO: 74051 - RNA, 19 nt, Artificial Sequence
  Chemically synthesized
ugcaguacugaagggaacg

SEQ ID NO: 74052 - RNA, 19 nt, Artificial Sequence
  Chemically synthesized
aguuucucuugcauuuccu

SEQ ID NO: 74053 - RNA, 19 nt, Artificial Sequence
  Chemically synthesized
cuucaaggagcuaaaaaug

SEQ ID NO: 74054 - RNA, 19 nt, Artificial Sequence
  Chemically synthesized
acauaauaucaaaggagag

SEQ ID NO: 74055 - RNA, 19 nt, Artificial Sequence
  Chemically synthesized
aagucugggagauucccac

SEQ ID NO: 74056 - RNA, 19 nt, Artificial Sequence
  Chemically synthesized
cauaucaugucugagcgcg

SEQ ID NO: 74057 - RNA, 19 nt, Artificial Sequence
  Chemically synthesized
ugcauaucacaagcccgcu

SEQ ID NO: 74058 - RNA, 19 nt, Artificial Sequence
  Chemically synthesized
agugggaguggaaagguuc

SEQ ID NO: 74059 - RNA, 19 nt, Artificial Sequence
  Chemically synthesized
uuuggcacccgauggcaau

SEQ ID NO: 74060 - RNA, 19 nt, Artificial Sequence
  Chemically synthesized
ugcaaggcaauguuggcug

SEQ ID NO: 74061 - RNA, 19 nt, Artificial Sequence
  Chemically synthesized
ucuuuccaucuuguugguc

SEQ ID NO: 74062 - RNA, 19 nt, Artificial Sequence
  Chemically synthesized
gaucuuugagacuuccaug

SEQ ID NO: 74063 - RNA, 19 nt, Artificial Sequence
  Chemically synthesized
agauaugaagugcagguug

SEQ ID NO: 74064 - RNA, 19 nt, Artificial Sequence
  Chemically synthesized
acaccauucuuccuggccu

SEQ ID NO: 74065 - RNA, 19 nt, Artificial Sequence
  Chemically synthesized
ucuuucucuccagugaagu

SEQ ID NO: 74066 - RNA, 19 nt, Artificial Sequence
  Chemically synthesized
ucuggucacauagaacaug

SEQ ID NO: 74067 - RNA, 19 nt, Artificial Sequence
  Chemically synthesized
agucuggucacauagaaca

SEQ ID NO: 74068 - RNA, 19 nt, Artificial Sequence
  Chemically synthesized
uccugaagaucaaaggcuc

SEQ ID NO: 74069 - RNA, 19 nt, Artificial Sequence
  Chemically synthesized
ugacuacuacaggccuagc

SEQ ID NO: 74070 - RNA, 19 nt, Artificial Sequence
  Chemically synthesized
uguagcuaagguuggcuug

SEQ ID NO: 74071 - RNA, 19 nt, Artificial Sequence
  Chemically synthesized
uggaacugaacacaaauau

SEQ ID NO: 74072 - RNA, 19 nt, Artificial Sequence
  Chemically synthesized
caaaggagaguuuaauacu

SEQ ID NO: 74073 - RNA, 19 nt, Artificial Sequence
  Chemically synthesized
aaacucucacucuaggaca

SEQ ID NO: 74074 - RNA, 19 nt, Artificial Sequence
  Chemically synthesized
augggcaaagaucaauaag

SEQ ID NO: 74075 - RNA, 19 nt, Artificial Sequence
  Chemically synthesized
agugaagugcacauugcuc

SEQ ID NO: 74076 - RNA, 19 nt, Artificial Sequence
  Chemically synthesized
gucauagcccaaaagcuug

SEQ ID NO: 74077 - RNA, 19 nt, Artificial Sequence
  Chemically synthesized
cuagggaaacacaccauuc

SEQ ID NO: 74078 - RNA, 19 nt, Artificial Sequence
  Chemically synthesized
uucuucagagccaaaagau

SEQ ID NO: 74079 - RNA, 19 nt, Artificial Sequence
  Chemically synthesized
ccacauaauaucaaaggag

SEQ ID NO: 74080 - RNA, 19 nt, Artificial Sequence
  Chemically synthesized
gagagauggacguuucuca

SEQ ID NO: 74081 - RNA, 19 nt, Artificial Sequence
  Chemically synthesized
uaucucacacaugauaugu

SEQ ID NO: 74082 - RNA, 19 nt, Artificial Sequence
  Chemically synthesized
aauguuggcugacaggcug

SEQ ID NO: 74083 - RNA, 19 nt, Artificial Sequence
  Chemically synthesized
uuccaucuuguuggucaac

SEQ ID NO: 74084 - RNA, 19 nt, Artificial Sequence
  Chemically synthesized
acuacauuacaucuuugag

SEQ ID NO: 74085 - RNA, 19 nt, Artificial Sequence
  Chemically synthesized
agggagauaagcuaggaag

SEQ ID NO: 74086 - RNA, 19 nt, Artificial Sequence
  Chemically synthesized
acgugcauaucacaagccc

SEQ ID NO: 74087 - RNA, 21 nt, Artificial Sequence
  Chemically synthesized
gcuucauaucucucccuucuu

SEQ ID NO: 74088 - RNA, 21 nt, Artificial Sequence
  Chemically synthesized
gcuuaucucccugcuucauau

SEQ ID NO: 74089 - RNA, 21 nt, Artificial Sequence
  Chemically synthesized
uucauaucucucccuucuuua

SEQ ID NO: 74090 - RNA, 21 nt, Artificial Sequence
  Chemically synthesized
caguauuaaacucuccuuuga

SEQ ID NO: 74091 - RNA, 21 nt, Artificial Sequence
  Chemically synthesized
gguugaccaacaagauggaaa

SEQ ID NO: 74092 - RNA, 21 nt, Artificial Sequence
  Chemically synthesized
cuucauaucucucccuucuuu

SEQ ID NO: 74093 - RNA, 21 nt, Artificial Sequence
  Chemically synthesized
cuagcuuaucucccugcuuca

SEQ ID NO: 74094 - RNA, 21 nt, Artificial Sequence
  Chemically synthesized
ggugcaaggagaugucugaau

SEQ ID NO: 74095 - RNA, 21 nt, Artificial Sequence
  Chemically synthesized
ccuuuaucccugcuuaucuga

SEQ ID NO: 74096 - RNA, 21 nt, Artificial Sequence
  Chemically synthesized
uauugaucuuugcccauggaa

SEQ ID NO: 74097 - RNA, 21 nt, Artificial Sequence
  Chemically synthesized
caacauugccuugcauuugua

SEQ ID NO: 74098 - RNA, 21 nt, Artificial Sequence
  Chemically synthesized
ccgacaugcugguuaagguga

SEQ ID NO: 74099 - RNA, 21 nt, Artificial Sequence
  Chemically synthesized
cucccauggucccuagcaaaa

SEQ ID NO: 74100 - RNA, 21 nt, Artificial Sequence
  Chemically synthesized
cugcuucauaucucucccuuc

SEQ ID NO: 74101 - RNA, 21 nt, Artificial Sequence
  Chemically synthesized
ggcuuuuauuucagugccaua

SEQ ID NO: 74102 - RNA, 21 nt, Artificial Sequence
  Chemically synthesized
ucauaucucucccuucuuuac

SEQ ID NO: 74103 - RNA, 21 nt, Artificial Sequence
  Chemically synthesized
uguugagcaaugugcacuuca

SEQ ID NO: 74104 - RNA, 21 nt, Artificial Sequence
  Chemically synthesized
cauagugggccuucauuaaau

SEQ ID NO: 74105 - RNA, 21 nt, Artificial Sequence
  Chemically synthesized
caucagagaaggccaggaaga

SEQ ID NO: 74106 - RNA, 21 nt, Artificial Sequence
  Chemically synthesized
agcuuaucucccugcuucaua

SEQ ID NO: 74107 - RNA, 21 nt, Artificial Sequence
  Chemically synthesized
cggugcaaggagaugucugaa

SEQ ID NO: 74108 - RNA, 21 nt, Artificial Sequence
  Chemically synthesized
ucucucccuucuuuaccuuca

SEQ ID NO: 74109 - RNA, 21 nt, Artificial Sequence
  Chemically synthesized
cagacugcacaggaaaugcaa

SEQ ID NO: 74110 - RNA, 21 nt, Artificial Sequence
  Chemically synthesized
ugccaucgggugccaaauaaa

SEQ ID NO: 74111 - RNA, 21 nt, Artificial Sequence
  Chemically synthesized
cuuaucucccugcuucauauc

SEQ ID NO: 74112 - RNA, 21 nt, Artificial Sequence
  Chemically synthesized
uaaggugaacgcacuuaucaa

SEQ ID NO: 74113 - RNA, 21 nt, Artificial Sequence
  Chemically synthesized
guuagaacaucuucuggagaa

SEQ ID NO: 74114 - RNA, 21 nt, Artificial Sequence
  Chemically synthesized
cuuuaucccugcuuaucugaa

SEQ ID NO: 74115 - RNA, 21 nt, Artificial Sequence
  Chemically synthesized
uuaucucccugcuucauaucu

SEQ ID NO: 74116 - RNA, 21 nt, Artificial Sequence
  Chemically synthesized
cucccuucuuuaccuucauuu

SEQ ID NO: 74117 - RNA, 21 nt, Artificial Sequence
  Chemically synthesized
gaauguuucagcugcaguuga

SEQ ID NO: 74118 - RNA, 21 nt, Artificial Sequence
  Chemically synthesized
ccauauuuguguucaguucca

SEQ ID NO: 74119 - RNA, 21 nt, Artificial Sequence
  Chemically synthesized
cguccaucucucucccuuacu

SEQ ID NO: 74120 - RNA, 21 nt, Artificial Sequence
  Chemically synthesized
auaucucucccuucuuuaccu

SEQ ID NO: 74121 - RNA, 21 nt, Artificial Sequence
  Chemically synthesized
guguguggcaugcauccucau

SEQ ID NO: 74122 - RNA, 21 nt, Artificial Sequence
  Chemically synthesized
aggacaucaucaccuuggaaa

SEQ ID NO: 74123 - RNA, 21 nt, Artificial Sequence
  Chemically synthesized
uaucucucccuucuuuaccuu

SEQ ID NO: 74124 - RNA, 21 nt, Artificial Sequence
  Chemically synthesized
cuuucaguauuaaacucuccu

SEQ ID NO: 74125 - RNA, 21 nt, Artificial Sequence
  Chemically synthesized
gagugagaguuuggaaggugu

SEQ ID NO: 74126 - RNA, 21 nt, Artificial Sequence
  Chemically synthesized
uagucaaggugcucaauaaau

SEQ ID NO: 74127 - RNA, 21 nt, Artificial Sequence
  Chemically synthesized
cacuggagagaaagaacugga

SEQ ID NO: 74128 - RNA, 21 nt, Artificial Sequence
  Chemically synthesized
gaagaaggcaagccaaccuua

SEQ ID NO: 74129 - RNA, 21 nt, Artificial Sequence
  Chemically synthesized
guauugccaucgggugccaaa

SEQ ID NO: 74130 - RNA, 21 nt, Artificial Sequence
  Chemically synthesized
cauuaguuaagaugucugaga

SEQ ID NO: 74131 - RNA, 21 nt, Artificial Sequence
  Chemically synthesized
aggccaaagugggcaguuuca

SEQ ID NO: 74132 - RNA, 21 nt, Artificial Sequence
  Chemically synthesized
gagaguuuggaagguguccaa

SEQ ID NO: 74133 - RNA, 21 nt, Artificial Sequence
  Chemically synthesized
cuggcauuuuuagcuccuuga

SEQ ID NO: 74134 - RNA, 21 nt, Artificial Sequence
  Chemically synthesized
ugcuaggccuguaguagucaa

SEQ ID NO: 74135 - RNA, 21 nt, Artificial Sequence
  Chemically synthesized
ccaacaagauggaaagaacca

SEQ ID NO: 74136 - RNA, 21 nt, Artificial Sequence
  Chemically synthesized
ggaaaugcaagagaaacugca

SEQ ID NO: 74137 - RNA, 21 nt, Artificial Sequence
  Chemically synthesized
cucccugcuucauaucucucc

SEQ ID NO: 74138 - RNA, 21 nt, Artificial Sequence
  Chemically synthesized
guuuguugaauaaaagaggga

SEQ ID NO: 74139 - RNA, 21 nt, Artificial Sequence
  Chemically synthesized
caucauccacgccaaguggaa

SEQ ID NO: 74140 - RNA, 21 nt, Artificial Sequence
  Chemically synthesized
gacugcacaggaaaugcaaga

SEQ ID NO: 74141 - RNA, 21 nt, Artificial Sequence
  Chemically synthesized
gguuuuucagcucuuugacaa

SEQ ID NO: 74142 - RNA, 21 nt, Artificial Sequence
  Chemically synthesized
ccaucucucucccuuacuauu

SEQ ID NO: 74143 - RNA, 21 nt, Artificial Sequence
  Chemically synthesized
gaguuuggaagguguccaaau

SEQ ID NO: 74144 - RNA, 21 nt, Artificial Sequence
  Chemically synthesized
caaagaucuuucguugguugu

SEQ ID NO: 74145 - RNA, 21 nt, Artificial Sequence
  Chemically synthesized
ccaacuucccuguucuuuaag

SEQ ID NO: 74146 - RNA, 21 nt, Artificial Sequence
  Chemically synthesized
gaaaaguugccgaagaugaga

SEQ ID NO: 74147 - RNA, 21 nt, Artificial Sequence
  Chemically synthesized
uauggaaguauuugagagaga

SEQ ID NO: 74148 - RNA, 21 nt, Artificial Sequence
  Chemically synthesized
agacauaucaugugugagaua

SEQ ID NO: 74149 - RNA, 21 nt, Artificial Sequence
  Chemically synthesized
aucucccugcuucauaucucu

SEQ ID NO: 74150 - RNA, 21 nt, Artificial Sequence
  Chemically synthesized
ucucccugcuucauaucucuc

SEQ ID NO: 74151 - RNA, 21 nt, Artificial Sequence
  Chemically synthesized
aagugggcaguuucagccaga

SEQ ID NO: 74152 - RNA, 21 nt, Artificial Sequence
  Chemically synthesized
ugaccaacaagauggaaagaa

SEQ ID NO: 74153 - RNA, 21 nt, Artificial Sequence
  Chemically synthesized
uaucaaggaucgggaagguua

SEQ ID NO: 74154 - RNA, 21 nt, Artificial Sequence
  Chemically synthesized
uaguagucaaggugcucaaua

SEQ ID NO: 74155 - RNA, 21 nt, Artificial Sequence
  Chemically synthesized
gugaagccuugcacuccugaa

SEQ ID NO: 74156 - RNA, 21 nt, Artificial Sequence
  Chemically synthesized
gaagacauaucaugugugaga

SEQ ID NO: 74157 - RNA, 21 nt, Artificial Sequence
  Chemically synthesized
cugagaaacguccaucucucu

SEQ ID NO: 74158 - RNA, 21 nt, Artificial Sequence
  Chemically synthesized
acaggaucauguaaaugcuca

SEQ ID NO: 74159 - RNA, 21 nt, Artificial Sequence
  Chemically synthesized
auaaaagagggaagaaggcaa

SEQ ID NO: 74160 - RNA, 21 nt, Artificial Sequence
  Chemically synthesized
aucucucccuucuuuaccuuc

SEQ ID NO: 74161 - RNA, 21 nt, Artificial Sequence
  Chemically synthesized
uguucaguuccagcuuuugua

SEQ ID NO: 74162 - RNA, 21 nt, Artificial Sequence
  Chemically synthesized
uccucaacuugcugccuaaga

SEQ ID NO: 74163 - RNA, 21 nt, Artificial Sequence
  Chemically synthesized
cccaacuucccuguucuuuaa

SEQ ID NO: 74164 - RNA, 21 nt, Artificial Sequence
  Chemically synthesized
caucuaugguguggaugggaa

SEQ ID NO: 74165 - RNA, 21 nt, Artificial Sequence
  Chemically synthesized
ugguguggaugggaaacugcu

SEQ ID NO: 74166 - RNA, 21 nt, Artificial Sequence
  Chemically synthesized
aacguccaucucucucccuua

SEQ ID NO: 74167 - RNA, 21 nt, Artificial Sequence
  Chemically synthesized
ugacguccauguucuauguga

SEQ ID NO: 74168 - RNA, 21 nt, Artificial Sequence
  Chemically synthesized
cuugcacuccugaauuuuauc

SEQ ID NO: 74169 - RNA, 21 nt, Artificial Sequence
  Chemically synthesized
ugcuucauaucucucccuucu

SEQ ID NO: 74170 - RNA, 21 nt, Artificial Sequence
  Chemically synthesized
guugaagagccugacaaguga

SEQ ID NO: 74171 - RNA, 21 nt, Artificial Sequence
  Chemically synthesized
gugauuucuugcuaagcucca

SEQ ID NO: 74172 - RNA, 21 nt, Artificial Sequence
  Chemically synthesized
acuuguuuccugugcccauca

SEQ ID NO: 74173 - RNA, 21 nt, Artificial Sequence
  Chemically synthesized
cugucuuuuuccuuccugaga

SEQ ID NO: 74174 - RNA, 21 nt, Artificial Sequence
  Chemically synthesized
gucuuuuuccuuccugagaaa

SEQ ID NO: 74175 - RNA, 21 nt, Artificial Sequence
  Chemically synthesized
cuccagucuguucucacauaa

SEQ ID NO: 74176 - RNA, 21 nt, Artificial Sequence
  Chemically synthesized
aaugcaagagaaacugcagaa

SEQ ID NO: 74177 - RNA, 21 nt, Artificial Sequence
  Chemically synthesized
aagaaaaguugccgaagauga

SEQ ID NO: 74178 - RNA, 21 nt, Artificial Sequence
  Chemically synthesized
uugcacuccugaauuuuauca

SEQ ID NO: 74179 - RNA, 21 nt, Artificial Sequence
  Chemically synthesized
cucucccuucuuuaccuucau

SEQ ID NO: 74180 - RNA, 21 nt, Artificial Sequence
  Chemically synthesized
cauaucucucccuucuuuacc

SEQ ID NO: 74181 - RNA, 21 nt, Artificial Sequence
  Chemically synthesized
gauagagccuuugaucuucag

SEQ ID NO: 74182 - RNA, 21 nt, Artificial Sequence
  Chemically synthesized
guuugugagccuugcugccaa

SEQ ID NO: 74183 - RNA, 21 nt, Artificial Sequence
  Chemically synthesized
ugucuagaauccugcuuuaca

SEQ ID NO: 74184 - RNA, 21 nt, Artificial Sequence
  Chemically synthesized
gaagguuaugcuccuggcaca

SEQ ID NO: 74185 - RNA, 21 nt, Artificial Sequence
  Chemically synthesized
aacuccucaacuugcugccua

SEQ ID NO: 74186 - RNA, 21 nt, Artificial Sequence
  Chemically synthesized
guuguugagcgaauuguuaga

SEQ ID NO: 74187 - RNA, 21 nt, Artificial Sequence
  Chemically synthesized
uacucuagucacccucuucaa

SEQ ID NO: 74188 - RNA, 21 nt, Artificial Sequence
  Chemically synthesized
agaacaucuucuggagaagga

SEQ ID NO: 74189 - RNA, 21 nt, Artificial Sequence
  Chemically synthesized
caaggagaugucugaauacug

SEQ ID NO: 74190 - RNA, 21 nt, Artificial Sequence
  Chemically synthesized
ggaaaugagggagcucaucca

SEQ ID NO: 74191 - RNA, 21 nt, Artificial Sequence
  Chemically synthesized
gaaacguccaucucucucccu

SEQ ID NO: 74192 - RNA, 21 nt, Artificial Sequence
  Chemically synthesized
ccaucuaugguguggauggga

SEQ ID NO: 74193 - RNA, 21 nt, Artificial Sequence
  Chemically synthesized
caugcauccucaucaucagga

SEQ ID NO: 74194 - RNA, 21 nt, Artificial Sequence
  Chemically synthesized
ggugaacgcacuuaucaagga

SEQ ID NO: 74195 - RNA, 21 nt, Artificial Sequence
  Chemically synthesized
ccaagagguuuuucagcucuu

SEQ ID NO: 74196 - RNA, 21 nt, Artificial Sequence
  Chemically synthesized
gucugagagaccaucuccuau

SEQ ID NO: 74197 - RNA, 21 nt, Artificial Sequence
  Chemically synthesized
uugacaacgccaacugcccaa

SEQ ID NO: 74198 - RNA, 21 nt, Artificial Sequence
  Chemically synthesized
cuuuugacaauauacacggau

SEQ ID NO: 74199 - RNA, 21 nt, Artificial Sequence
  Chemically synthesized
gccaggauuugguuguuuaaa

SEQ ID NO: 74200 - RNA, 21 nt, Artificial Sequence
  Chemically synthesized
uguuguugagcgaauuguuag

SEQ ID NO: 74201 - RNA, 21 nt, Artificial Sequence
  Chemically synthesized
agguuaugcuccuggcacaga

SEQ ID NO: 74202 - RNA, 21 nt, Artificial Sequence
  Chemically synthesized
ccuauugccaggaauguuuca

SEQ ID NO: 74203 - RNA, 21 nt, Artificial Sequence
  Chemically synthesized
gauuuuguauugccaucgggu

SEQ ID NO: 74204 - RNA, 21 nt, Artificial Sequence
  Chemically synthesized
ggcacauagugggccuucauu

SEQ ID NO: 74205 - RNA, 21 nt, Artificial Sequence
  Chemically synthesized
gauggaaagaaccacgcagga

SEQ ID NO: 74206 - RNA, 21 nt, Artificial Sequence
  Chemically synthesized
uaaagaaaaguugccgaagau

SEQ ID NO: 74207 - RNA, 21 nt, Artificial Sequence
  Chemically synthesized
caucgaggcucuugcucaagu

SEQ ID NO: 74208 - RNA, 21 nt, Artificial Sequence
  Chemically synthesized
gcuuuugggcuaugacgucca

SEQ ID NO: 74209 - RNA, 21 nt, Artificial Sequence
  Chemically synthesized
ugaagagccugacaagugaag

SEQ ID NO: 74210 - RNA, 21 nt, Artificial Sequence
  Chemically synthesized
gugcaaggagaugucugaaua

SEQ ID NO: 74211 - RNA, 21 nt, Artificial Sequence
  Chemically synthesized
uuucguugguuguuucucuga

SEQ ID NO: 74212 - RNA, 21 nt, Artificial Sequence
  Chemically synthesized
aguauggaaguauuugagaga

SEQ ID NO: 74213 - RNA, 21 nt, Artificial Sequence
  Chemically synthesized
aucagagaaggccaggaagaa

SEQ ID NO: 74214 - RNA, 21 nt, Artificial Sequence
  Chemically synthesized
cuuccugagaaacguccaucu

SEQ ID NO: 74215 - RNA, 21 nt, Artificial Sequence
  Chemically synthesized
acaucuucuggagaaggacau

SEQ ID NO: 74216 - RNA, 21 nt, Artificial Sequence
  Chemically synthesized
agagguuuuucagcucuuuga

SEQ ID NO: 74217 - RNA, 21 nt, Artificial Sequence
  Chemically synthesized
gaccacaggaggugugauaga

SEQ ID NO: 74218 - RNA, 21 nt, Artificial Sequence
  Chemically synthesized
cuuucauucaaucaaccugca

SEQ ID NO: 74219 - RNA, 21 nt, Artificial Sequence
  Chemically synthesized
ucuucaccuugguuuaugaga

SEQ ID NO: 74220 - RNA, 21 nt, Artificial Sequence
  Chemically synthesized
uguuggcugcugccaccaaau

SEQ ID NO: 74221 - RNA, 21 nt, Artificial Sequence
  Chemically synthesized
aaacguccaucucucucccuu

SEQ ID NO: 74222 - RNA, 21 nt, Artificial Sequence
  Chemically synthesized
cuagaauccugcuuuacagga

SEQ ID NO: 74223 - RNA, 21 nt, Artificial Sequence
  Chemically synthesized
caaacacacuuccagcuggca

SEQ ID NO: 74224 - RNA, 21 nt, Artificial Sequence
  Chemically synthesized
ccagcuggcauauagguugca

SEQ ID NO: 74225 - RNA, 21 nt, Artificial Sequence
  Chemically synthesized
caaacagcuguuguugagcga

SEQ ID NO: 74226 - RNA, 21 nt, Artificial Sequence
  Chemically synthesized
ucucccauggucccuagcaaa

SEQ ID NO: 74227 - RNA, 21 nt, Artificial Sequence
  Chemically synthesized
gugcacuucacuggagagaaa

SEQ ID NO: 74228 - RNA, 21 nt, Artificial Sequence
  Chemically synthesized
acuauucccacuuucauucaa

SEQ ID NO: 74229 - RNA, 21 nt, Artificial Sequence
  Chemically synthesized
guuuucugagcgggcuuguga

SEQ ID NO: 74230 - RNA, 21 nt, Artificial Sequence
  Chemically synthesized
guugagcgaauuguuagaaca

SEQ ID NO: 74231 - RNA, 21 nt, Artificial Sequence
  Chemically synthesized
cuuuuggcucugaagaagcaa

SEQ ID NO: 74232 - RNA, 21 nt, Artificial Sequence
  Chemically synthesized
cuuggaaaugagggagcucau

SEQ ID NO: 74233 - RNA, 21 nt, Artificial Sequence
  Chemically synthesized
auuucagugccauacauguua

SEQ ID NO: 74234 - RNA, 21 nt, Artificial Sequence
  Chemically synthesized
acucuccuuugauauuaugug

SEQ ID NO: 74235 - RNA, 21 nt, Artificial Sequence
  Chemically synthesized
cucucucccuuacuauuccca

SEQ ID NO: 74236 - RNA, 21 nt, Artificial Sequence
  Chemically synthesized
ccuagagugagaguuuggaag

SEQ ID NO: 74237 - RNA, 21 nt, Artificial Sequence
  Chemically synthesized
gcucugaagaagcaaacauga

SEQ ID NO: 74238 - RNA, 21 nt, Artificial Sequence
  Chemically synthesized
ucuuugcccauggaagucuca

SEQ ID NO: 74239 - RNA, 21 nt, Artificial Sequence
  Chemically synthesized
uuaucuuuuggcucugaagaa

SEQ ID NO: 74240 - RNA, 21 nt, Artificial Sequence
  Chemically synthesized
aggccagcuccuuuucuguga

SEQ ID NO: 74241 - RNA, 21 nt, Artificial Sequence
  Chemically synthesized
ccagacugcacaggaaaugca

SEQ ID NO: 74242 - RNA, 21 nt, Artificial Sequence
  Chemically synthesized
gguguguuucccuagacucug

SEQ ID NO: 74243 - RNA, 21 nt, Artificial Sequence
  Chemically synthesized
cauguguuuugcuuuuaucca

SEQ ID NO: 74244 - RNA, 21 nt, Artificial Sequence
  Chemically synthesized
ugcccaagccuacagaacaaa

SEQ ID NO: 74245 - RNA, 21 nt, Artificial Sequence
  Chemically synthesized
ccuucuuccucaagucuugac

SEQ ID NO: 74246 - RNA, 21 nt, Artificial Sequence
  Chemically synthesized
auucaaucaaccugcacuuca

SEQ ID NO: 74247 - RNA, 21 nt, Artificial Sequence
  Chemically synthesized
cacacuuccagcuggcauaua

SEQ ID NO: 74248 - RNA, 21 nt, Artificial Sequence
  Chemically synthesized
uguugaauaaaagagggaaga

SEQ ID NO: 74249 - RNA, 21 nt, Artificial Sequence
  Chemically synthesized
cuugguuuaugagaacugguu

SEQ ID NO: 74250 - RNA, 21 nt, Artificial Sequence
  Chemically synthesized
agaguuuggaagguguccaaa

SEQ ID NO: 74251 - RNA, 21 nt, Artificial Sequence
  Chemically synthesized
cagccaacauugccuugcauu

SEQ ID NO: 74252 - RNA, 21 nt, Artificial Sequence
  Chemically synthesized
uguuagaacaucuucuggaga

SEQ ID NO: 74253 - RNA, 21 nt, Artificial Sequence
  Chemically synthesized
caguuucagccagaaugugga

SEQ ID NO: 74254 - RNA, 21 nt, Artificial Sequence
  Chemically synthesized
uccugagaaacguccaucucu

SEQ ID NO: 74255 - RNA, 21 nt, Artificial Sequence
  Chemically synthesized
gugugauagagccuuugaucu

SEQ ID NO: 74256 - RNA, 21 nt, Artificial Sequence
  Chemically synthesized
cccacugccaggauuuuguau

SEQ ID NO: 74257 - RNA, 21 nt, Artificial Sequence
  Chemically synthesized
caccaaacgagguuccuggua

SEQ ID NO: 74258 - RNA, 21 nt, Artificial Sequence
  Chemically synthesized
cucugucuuuuuccuuccuga

SEQ ID NO: 74259 - RNA, 21 nt, Artificial Sequence
  Chemically synthesized
cucugaagaagcaaacaugac

SEQ ID NO: 74260 - RNA, 21 nt, Artificial Sequence
  Chemically synthesized
caagccaaccuuagcuacaau

SEQ ID NO: 74261 - RNA, 21 nt, Artificial Sequence
  Chemically synthesized
gagagaaccuuuccacuccca

SEQ ID NO: 74262 - RNA, 21 nt, Artificial Sequence
  Chemically synthesized
cuuacuauucccacuuucauu

SEQ ID NO: 74263 - RNA, 21 nt, Artificial Sequence
  Chemically synthesized
gaaacugcuccagcuccaaga

SEQ ID NO: 74264 - RNA, 21 nt, Artificial Sequence
  Chemically synthesized
aaaugagggcagaaaccuugu

SEQ ID NO: 74265 - RNA, 21 nt, Artificial Sequence
  Chemically synthesized
cauguaaaugcucaaagaugu

SEQ ID NO: 74266 - RNA, 21 nt, Artificial Sequence
  Chemically synthesized
caacuucccuguucuuuaaga

SEQ ID NO: 74267 - RNA, 21 nt, Artificial Sequence
  Chemically synthesized
gaauccugcuuuacaggauca

SEQ ID NO: 74268 - RNA, 21 nt, Artificial Sequence
  Chemically synthesized
aaaugcaagagaaacugcaga

SEQ ID NO: 74269 - RNA, 21 nt, Artificial Sequence
  Chemically synthesized
cuuugcccauggaagucucaa

SEQ ID NO: 74270 - RNA, 21 nt, Artificial Sequence
  Chemically synthesized
caaagugggcaguuucagcca

SEQ ID NO: 74271 - RNA, 21 nt, Artificial Sequence
  Chemically synthesized
aaaugcuaggccuguaguagu

SEQ ID NO: 74272 - RNA, 21 nt, Artificial Sequence
  Chemically synthesized
aaauggugauuucuugcuaag

SEQ ID NO: 74273 - RNA, 21 nt, Artificial Sequence
  Chemically synthesized
cacuuaucaaggaucgggaag

SEQ ID NO: 74274 - RNA, 21 nt, Artificial Sequence
  Chemically synthesized
cccuucuuuaccuucauuuca

SEQ ID NO: 74275 - RNA, 21 nt, Artificial Sequence
  Chemically synthesized
uguuuuuccauguguuuugcu

SEQ ID NO: 74276 - RNA, 21 nt, Artificial Sequence
  Chemically synthesized
gugucugucaccacaucuugu

SEQ ID NO: 74277 - RNA, 21 nt, Artificial Sequence
  Chemically synthesized
agaaaaguugccgaagaugag

SEQ ID NO: 74278 - RNA, 21 nt, Artificial Sequence
  Chemically synthesized
gcuccuugaagacauaucaug

SEQ ID NO: 74279 - RNA, 21 nt, Artificial Sequence
  Chemically synthesized
ugcuuaucugaaacuucccaa

SEQ ID NO: 74280 - RNA, 21 nt, Artificial Sequence
  Chemically synthesized
ccacgcgcucagacaugauau

SEQ ID NO: 74281 - RNA, 21 nt, Artificial Sequence
  Chemically synthesized
ccuugaaccucauuaaauggu

SEQ ID NO: 74282 - RNA, 21 nt, Artificial Sequence
  Chemically synthesized
auuccaccggugcaaggagau

SEQ ID NO: 74283 - RNA, 21 nt, Artificial Sequence
  Chemically synthesized
uugugauaugcacguggccga

SEQ ID NO: 74284 - RNA, 21 nt, Artificial Sequence
  Chemically synthesized
uuguguucaguuccagcuuuu

SEQ ID NO: 74285 - RNA, 21 nt, Artificial Sequence
  Chemically synthesized
cuuuguuacugaaaugagccu

SEQ ID NO: 74286 - RNA, 21 nt, Artificial Sequence
  Chemically synthesized
uucccuagacucuguaaccac

SEQ ID NO: 74287 - RNA, 21 nt, Artificial Sequence
  Chemically synthesized
gaaggacaucaucaccuugga

SEQ ID NO: 74288 - RNA, 21 nt, Artificial Sequence
  Chemically synthesized
auuuguuugggugguuuguga

SEQ ID NO: 74289 - RNA, 21 nt, Artificial Sequence
  Chemically synthesized
gcaagccaaccuuagcuacaa

SEQ ID NO: 74290 - RNA, 21 nt, Artificial Sequence
  Chemically synthesized
aggugguguccuucuuccuca

SEQ ID NO: 74291 - RNA, 21 nt, Artificial Sequence
  Chemically synthesized
acgagguuccugguacaucga

SEQ ID NO: 74292 - RNA, 21 nt, Artificial Sequence
  Chemically synthesized
uaaccaccucucugucuuuuu

SEQ ID NO: 74293 - RNA, 21 nt, Artificial Sequence
  Chemically synthesized
agguuuuucagcucuuugaca

SEQ ID NO: 74294 - RNA, 21 nt, Artificial Sequence
  Chemically synthesized
aaccugcacuucauaucuaga

SEQ ID NO: 74295 - RNA, 21 nt, Artificial Sequence
  Chemically synthesized
cagugccauacauguuauugu

SEQ ID NO: 74296 - RNA, 21 nt, Artificial Sequence
  Chemically synthesized
uggaagguguccaaauuuaau

SEQ ID NO: 74297 - RNA, 21 nt, Artificial Sequence
  Chemically synthesized
ugauagagccuuugaucuuca

SEQ ID NO: 74298 - RNA, 21 nt, Artificial Sequence
  Chemically synthesized
aagugaaguuguaaacacagu

SEQ ID NO: 74299 - RNA, 21 nt, Artificial Sequence
  Chemically synthesized
cuaugacguccauguucuaug

SEQ ID NO: 74300 - RNA, 21 nt, Artificial Sequence
  Chemically synthesized
ccaucgggugccaaauaaaug

SEQ ID NO: 74301 - RNA, 21 nt, Artificial Sequence
  Chemically synthesized
agugaugccgguaaagaaaag

SEQ ID NO: 74302 - RNA, 21 nt, Artificial Sequence
  Chemically synthesized
gagaaagaacuggaauuucgc

SEQ ID NO: 74303 - RNA, 21 nt, Artificial Sequence
  Chemically synthesized
accuugcugcaguguccagaa

SEQ ID NO: 74304 - RNA, 21 nt, Artificial Sequence
  Chemically synthesized
uggcauuuuuagcuccuugaa

SEQ ID NO: 74305 - RNA, 21 nt, Artificial Sequence
  Chemically synthesized
cucaacuugcugccuaagagg

SEQ ID NO: 74306 - RNA, 21 nt, Artificial Sequence
  Chemically synthesized
cuugguuggaccuauugccag

SEQ ID NO: 74307 - RNA, 21 nt, Artificial Sequence
  Chemically synthesized
ucagcucuuugacaacgccaa

SEQ ID NO: 74308 - RNA, 21 nt, Artificial Sequence
  Chemically synthesized
cuuccauucuuucuuccucca

SEQ ID NO: 74309 - RNA, 21 nt, Artificial Sequence
  Chemically synthesized
gcuccagcuccaagagguuuu

SEQ ID NO: 74310 - RNA, 21 nt, Artificial Sequence
  Chemically synthesized
uuuucugagcgggcuugugau

SEQ ID NO: 74311 - RNA, 21 nt, Artificial Sequence
  Chemically synthesized
caagcuuuugggcuaugacgu

SEQ ID NO: 74312 - RNA, 21 nt, Artificial Sequence
  Chemically synthesized
aaacagcuguuguugagcgaa

SEQ ID NO: 74313 - RNA, 21 nt, Artificial Sequence
  Chemically synthesized
uugccaucgggugccaaauaa

SEQ ID NO: 74314 - RNA, 21 nt, Artificial Sequence
  Chemically synthesized
uggcaugcauccucaucauca

SEQ ID NO: 74315 - RNA, 21 nt, Artificial Sequence
  Chemically synthesized
aguggucuccucucagcuucu

SEQ ID NO: 74316 - RNA, 21 nt, Artificial Sequence
  Chemically synthesized
ccagucuguucucacauaaca

SEQ ID NO: 74317 - RNA, 21 nt, Artificial Sequence
  Chemically synthesized
guacucuagucacccucuuca

SEQ ID NO: 74318 - RNA, 21 nt, Artificial Sequence
  Chemically synthesized
guccaucucucucccuuacua

SEQ ID NO: 74319 - RNA, 21 nt, Artificial Sequence
  Chemically synthesized
cuucugugucugucaccacau

SEQ ID NO: 74320 - RNA, 21 nt, Artificial Sequence
  Chemically synthesized
cagagaaggccaggaagaaug

SEQ ID NO: 74321 - RNA, 21 nt, Artificial Sequence
  Chemically synthesized
caagugaaguuguaaacacag

SEQ ID NO: 74322 - RNA, 21 nt, Artificial Sequence
  Chemically synthesized
uucucugagcuuuguuacuga

SEQ ID NO: 74323 - RNA, 21 nt, Artificial Sequence
  Chemically synthesized
ugugauagagccuuugaucuu

SEQ ID NO: 74324 - RNA, 21 nt, Artificial Sequence
  Chemically synthesized
aacacacuuccagcuggcaua

SEQ ID NO: 74325 - RNA, 21 nt, Artificial Sequence
  Chemically synthesized
uguggaugggaaacugcucca

SEQ ID NO: 74326 - RNA, 21 nt, Artificial Sequence
  Chemically synthesized
agucuguucucacauaacaga

SEQ ID NO: 74327 - RNA, 21 nt, Artificial Sequence
  Chemically synthesized
uagugggccuucauuaaaugu

SEQ ID NO: 74328 - RNA, 21 nt, Artificial Sequence
  Chemically synthesized
uguccuucuuccucaagucuu

SEQ ID NO: 74329 - RNA, 21 nt, Artificial Sequence
  Chemically synthesized
cuuguuuccugugcccaucau

SEQ ID NO: 74330 - RNA, 21 nt, Artificial Sequence
  Chemically synthesized
gacauaucaugugugagauaa

SEQ ID NO: 74331 - RNA, 21 nt, Artificial Sequence
  Chemically synthesized
ugcaguugaagagccugacaa

SEQ ID NO: 74332 - RNA, 21 nt, Artificial Sequence
  Chemically synthesized
aauaaaagagggaagaaggca

SEQ ID NO: 74333 - RNA, 21 nt, Artificial Sequence
  Chemically synthesized
aagaagggagagauaugaagc

SEQ ID NO: 74334 - RNA, 21 nt, Artificial Sequence
  Chemically synthesized
auaugaagcagggagauaagc

SEQ ID NO: 74335 - RNA, 21 nt, Artificial Sequence
  Chemically synthesized
uaaagaagggagagauaugaa

SEQ ID NO: 74336 - RNA, 21 nt, Artificial Sequence
  Chemically synthesized
ucaaaggagaguuuaauacug

SEQ ID NO: 74337 - RNA, 21 nt, Artificial Sequence
  Chemically synthesized
uuuccaucuuguuggucaacc

SEQ ID NO: 74338 - RNA, 21 nt, Artificial Sequence
  Chemically synthesized
aaagaagggagagauaugaag

SEQ ID NO: 74339 - RNA, 21 nt, Artificial Sequence
  Chemically synthesized
ugaagcagggagauaagcuag

SEQ ID NO: 74340 - RNA, 21 nt, Artificial Sequence
  Chemically synthesized
auucagacaucuccuugcacc

SEQ ID NO: 74341 - RNA, 21 nt, Artificial Sequence
  Chemically synthesized
ucagauaagcagggauaaagg

SEQ ID NO: 74342 - RNA, 21 nt, Artificial Sequence
  Chemically synthesized
uuccaugggcaaagaucaaua

SEQ ID NO: 74343 - RNA, 21 nt, Artificial Sequence
  Chemically synthesized
uacaaaugcaaggcaauguug

SEQ ID NO: 74344 - RNA, 21 nt, Artificial Sequence
  Chemically synthesized
ucaccuuaaccagcaugucgg

SEQ ID NO: 74345 - RNA, 21 nt, Artificial Sequence
  Chemically synthesized
uuuugcuagggaccaugggag

SEQ ID NO: 74346 - RNA, 21 nt, Artificial Sequence
  Chemically synthesized
gaagggagagauaugaagcag

SEQ ID NO: 74347 - RNA, 21 nt, Artificial Sequence
  Chemically synthesized
uauggcacugaaauaaaagcc

SEQ ID NO: 74348 - RNA, 21 nt, Artificial Sequence
  Chemically synthesized
guaaagaagggagagauauga

SEQ ID NO: 74349 - RNA, 21 nt, Artificial Sequence
  Chemically synthesized
ugaagugcacauugcucaaca

SEQ ID NO: 74350 - RNA, 21 nt, Artificial Sequence
  Chemically synthesized
auuuaaugaaggcccacuaug

SEQ ID NO: 74351 - RNA, 21 nt, Artificial Sequence
  Chemically synthesized
ucuuccuggccuucucugaug

SEQ ID NO: 74352 - RNA, 21 nt, Artificial Sequence
  Chemically synthesized
uaugaagcagggagauaagcu

SEQ ID NO: 74353 - RNA, 21 nt, Artificial Sequence
  Chemically synthesized
uucagacaucuccuugcaccg

SEQ ID NO: 74354 - RNA, 21 nt, Artificial Sequence
  Chemically synthesized
ugaagguaaagaagggagaga

SEQ ID NO: 74355 - RNA, 21 nt, Artificial Sequence
  Chemically synthesized
uugcauuuccugugcagucug

SEQ ID NO: 74356 - RNA, 21 nt, Artificial Sequence
  Chemically synthesized
uuuauuuggcacccgauggca

SEQ ID NO: 74357 - RNA, 21 nt, Artificial Sequence
  Chemically synthesized
gauaugaagcagggagauaag

SEQ ID NO: 74358 - RNA, 21 nt, Artificial Sequence
  Chemically synthesized
uugauaagugcguucaccuua

SEQ ID NO: 74359 - RNA, 21 nt, Artificial Sequence
  Chemically synthesized
uucuccagaagauguucuaac

SEQ ID NO: 74360 - RNA, 21 nt, Artificial Sequence
  Chemically synthesized
uucagauaagcagggauaaag

SEQ ID NO: 74361 - RNA, 21 nt, Artificial Sequence
  Chemically synthesized
agauaugaagcagggagauaa

SEQ ID NO: 74362 - RNA, 21 nt, Artificial Sequence
  Chemically synthesized
aaaugaagguaaagaagggag

SEQ ID NO: 74363 - RNA, 21 nt, Artificial Sequence
  Chemically synthesized
ucaacugcagcugaaacauuc

SEQ ID NO: 74364 - RNA, 21 nt, Artificial Sequence
  Chemically synthesized
uggaacugaacacaaauaugg

SEQ ID NO: 74365 - RNA, 21 nt, Artificial Sequence
  Chemically synthesized
aguaagggagagagauggacg

SEQ ID NO: 74366 - RNA, 21 nt, Artificial Sequence
  Chemically synthesized
agguaaagaagggagagauau

SEQ ID NO: 74367 - RNA, 21 nt, Artificial Sequence
  Chemically synthesized
augaggaugcaugccacacac

SEQ ID NO: 74368 - RNA, 21 nt, Artificial Sequence
  Chemically synthesized
uuuccaaggugaugauguccu

SEQ ID NO: 74369 - RNA, 21 nt, Artificial Sequence
  Chemically synthesized
aagguaaagaagggagagaua

SEQ ID NO: 74370 - RNA, 21 nt, Artificial Sequence
  Chemically synthesized
aggagaguuuaauacugaaag

SEQ ID NO: 74371 - RNA, 21 nt, Artificial Sequence
  Chemically synthesized
acaccuuccaaacucucacuc

SEQ ID NO: 74372 - RNA, 21 nt, Artificial Sequence
  Chemically synthesized
auuuauugagcaccuugacua

SEQ ID NO: 74373 - RNA, 21 nt, Artificial Sequence
  Chemically synthesized
uccaguucuuucucuccagug

SEQ ID NO: 74374 - RNA, 21 nt, Artificial Sequence
  Chemically synthesized
uaagguuggcuugccuucuuc

SEQ ID NO: 74375 - RNA, 21 nt, Artificial Sequence
  Chemically synthesized
uuuggcacccgauggcaauac

SEQ ID NO: 74376 - RNA, 21 nt, Artificial Sequence
  Chemically synthesized
ucucagacaucuuaacuaaug

SEQ ID NO: 74377 - RNA, 21 nt, Artificial Sequence
  Chemically synthesized
ugaaacugcccacuuuggccu

SEQ ID NO: 74378 - RNA, 21 nt, Artificial Sequence
  Chemically synthesized
uuggacaccuuccaaacucuc

SEQ ID NO: 74379 - RNA, 21 nt, Artificial Sequence
  Chemically synthesized
ucaaggagcuaaaaaugccag

SEQ ID NO: 74380 - RNA, 21 nt, Artificial Sequence
  Chemically synthesized
uugacuacuacaggccuagca

SEQ ID NO: 74381 - RNA, 21 nt, Artificial Sequence
  Chemically synthesized
ugguucuuuccaucuuguugg

SEQ ID NO: 74382 - RNA, 21 nt, Artificial Sequence
  Chemically synthesized
ugcaguuucucuugcauuucc

SEQ ID NO: 74383 - RNA, 21 nt, Artificial Sequence
  Chemically synthesized
ggagagauaugaagcagggag

SEQ ID NO: 74384 - RNA, 21 nt, Artificial Sequence
  Chemically synthesized
ucccucuuuuauucaacaaac

SEQ ID NO: 74385 - RNA, 21 nt, Artificial Sequence
  Chemically synthesized
uuccacuuggcguggaugaug

SEQ ID NO: 74386 - RNA, 21 nt, Artificial Sequence
  Chemically synthesized
ucuugcauuuccugugcaguc

SEQ ID NO: 74387 - RNA, 21 nt, Artificial Sequence
  Chemically synthesized
uugucaaagagcugaaaaacc

SEQ ID NO: 74388 - RNA, 21 nt, Artificial Sequence
  Chemically synthesized
aauaguaagggagagagaugg

SEQ ID NO: 74389 - RNA, 21 nt, Artificial Sequence
  Chemically synthesized
auuuggacaccuuccaaacuc

SEQ ID NO: 74390 - RNA, 21 nt, Artificial Sequence
  Chemically synthesized
acaaccaacgaaagaucuuug

SEQ ID NO: 74391 - RNA, 21 nt, Artificial Sequence
  Chemically synthesized
cuuaaagaacagggaaguugg

SEQ ID NO: 74392 - RNA, 21 nt, Artificial Sequence
  Chemically synthesized
ucucaucuucggcaacuuuuc

SEQ ID NO: 74393 - RNA, 21 nt, Artificial Sequence
  Chemically synthesized
ucucucucaaauacuuccaua

SEQ ID NO: 74394 - RNA, 21 nt, Artificial Sequence
  Chemically synthesized
uaucucacacaugauaugucu

SEQ ID NO: 74395 - RNA, 21 nt, Artificial Sequence
  Chemically synthesized
agagauaugaagcagggagau

SEQ ID NO: 74396 - RNA, 21 nt, Artificial Sequence
  Chemically synthesized
gagagauaugaagcagggaga

SEQ ID NO: 74397 - RNA, 21 nt, Artificial Sequence
  Chemically synthesized
ucuggcugaaacugcccacuu

SEQ ID NO: 74398 - RNA, 21 nt, Artificial Sequence
  Chemically synthesized
uucuuuccaucuuguugguca

SEQ ID NO: 74399 - RNA, 21 nt, Artificial Sequence
  Chemically synthesized
uaaccuucccgauccuugaua

SEQ ID NO: 74400 - RNA, 21 nt, Artificial Sequence
  Chemically synthesized
uauugagcaccuugacuacua

SEQ ID NO: 74401 - RNA, 21 nt, Artificial Sequence
  Chemically synthesized
uucaggagugcaaggcuucac

SEQ ID NO: 74402 - RNA, 21 nt, Artificial Sequence
  Chemically synthesized
ucucacacaugauaugucuuc

SEQ ID NO: 74403 - RNA, 21 nt, Artificial Sequence
  Chemically synthesized
agagagauggacguuucucag

SEQ ID NO: 74404 - RNA, 21 nt, Artificial Sequence
  Chemically synthesized
ugagcauuuacaugauccugu

SEQ ID NO: 74405 - RNA, 21 nt, Artificial Sequence
  Chemically synthesized
uugccuucuucccucuuuuau

SEQ ID NO: 74406 - RNA, 21 nt, Artificial Sequence
  Chemically synthesized
gaagguaaagaagggagagau

SEQ ID NO: 74407 - RNA, 21 nt, Artificial Sequence
  Chemically synthesized
uacaaaagcuggaacugaaca

SEQ ID NO: 74408 - RNA, 21 nt, Artificial Sequence
  Chemically synthesized
ucuuaggcagcaaguugagga

SEQ ID NO: 74409 - RNA, 21 nt, Artificial Sequence
  Chemically synthesized
uuaaagaacagggaaguuggg

SEQ ID NO: 74410 - RNA, 21 nt, Artificial Sequence
  Chemically synthesized
uucccauccacaccauagaug

SEQ ID NO: 74411 - RNA, 21 nt, Artificial Sequence
  Chemically synthesized
agcaguuucccauccacacca

SEQ ID NO: 74412 - RNA, 21 nt, Artificial Sequence
  Chemically synthesized
uaagggagagagauggacguu

SEQ ID NO: 74413 - RNA, 21 nt, Artificial Sequence
  Chemically synthesized
ucacauagaacauggacguca

SEQ ID NO: 74414 - RNA, 21 nt, Artificial Sequence
  Chemically synthesized
gauaaaauucaggagugcaag

SEQ ID NO: 74415 - RNA, 21 nt, Artificial Sequence
  Chemically synthesized
agaagggagagauaugaagca

SEQ ID NO: 74416 - RNA, 21 nt, Artificial Sequence
  Chemically synthesized
ucacuugucaggcucuucaac

SEQ ID NO: 74417 - RNA, 21 nt, Artificial Sequence
  Chemically synthesized
uggagcuuagcaagaaaucac

SEQ ID NO: 74418 - RNA, 21 nt, Artificial Sequence
  Chemically synthesized
ugaugggcacaggaaacaagu

SEQ ID NO: 74419 - RNA, 21 nt, Artificial Sequence
  Chemically synthesized
ucucaggaaggaaaaagacag

SEQ ID NO: 74420 - RNA, 21 nt, Artificial Sequence
  Chemically synthesized
uuucucaggaaggaaaaagac

SEQ ID NO: 74421 - RNA, 21 nt, Artificial Sequence
  Chemically synthesized
uuaugugagaacagacuggag

SEQ ID NO: 74422 - RNA, 21 nt, Artificial Sequence
  Chemically synthesized
uucugcaguuucucuugcauu

SEQ ID NO: 74423 - RNA, 21 nt, Artificial Sequence
  Chemically synthesized
ucaucuucggcaacuuuucuu

SEQ ID NO: 74424 - RNA, 21 nt, Artificial Sequence
  Chemically synthesized
ugauaaaauucaggagugcaa

SEQ ID NO: 74425 - RNA, 21 nt, Artificial Sequence
  Chemically synthesized
augaagguaaagaagggagag

SEQ ID NO: 74426 - RNA, 21 nt, Artificial Sequence
  Chemically synthesized
gguaaagaagggagagauaug

SEQ ID NO: 74427 - RNA, 21 nt, Artificial Sequence
  Chemically synthesized
cugaagaucaaaggcucuauc

SEQ ID NO: 74428 - RNA, 21 nt, Artificial Sequence
  Chemically synthesized
uuggcagcaaggcucacaaac

SEQ ID NO: 74429 - RNA, 21 nt, Artificial Sequence
  Chemically synthesized
uguaaagcaggauucuagaca

SEQ ID NO: 74430 - RNA, 21 nt, Artificial Sequence
  Chemically synthesized
ugugccaggagcauaaccuuc

SEQ ID NO: 74431 - RNA, 21 nt, Artificial Sequence
  Chemically synthesized
uaggcagcaaguugaggaguu

SEQ ID NO: 74432 - RNA, 21 nt, Artificial Sequence
  Chemically synthesized
ucuaacaauucgcucaacaac

SEQ ID NO: 74433 - RNA, 21 nt, Artificial Sequence
  Chemically synthesized
uugaagagggugacuagagua

SEQ ID NO: 74434 - RNA, 21 nt, Artificial Sequence
  Chemically synthesized
uccuucuccagaagauguucu

SEQ ID NO: 74435 - RNA, 21 nt, Artificial Sequence
  Chemically synthesized
caguauucagacaucuccuug

SEQ ID NO: 74436 - RNA, 21 nt, Artificial Sequence
  Chemically synthesized
uggaugagcucccucauuucc

SEQ ID NO: 74437 - RNA, 21 nt, Artificial Sequence
  Chemically synthesized
agggagagagauggacguuuc

SEQ ID NO: 74438 - RNA, 21 nt, Artificial Sequence
  Chemically synthesized
ucccauccacaccauagaugg

SEQ ID NO: 74439 - RNA, 21 nt, Artificial Sequence
  Chemically synthesized
uccugaugaugaggaugcaug

SEQ ID NO: 74440 - RNA, 21 nt, Artificial Sequence
  Chemically synthesized
uccuugauaagugcguucacc

SEQ ID NO: 74441 - RNA, 21 nt, Artificial Sequence
  Chemically synthesized
aagagcugaaaaaccucuugg

SEQ ID NO: 74442 - RNA, 21 nt, Artificial Sequence
  Chemically synthesized
auaggagauggucucucagac

SEQ ID NO: 74443 - RNA, 21 nt, Artificial Sequence
  Chemically synthesized
uugggcaguuggcguugucaa

SEQ ID NO: 74444 - RNA, 21 nt, Artificial Sequence
  Chemically synthesized
auccguguauauugucaaaag

SEQ ID NO: 74445 - RNA, 21 nt, Artificial Sequence
  Chemically synthesized
uuuaaacaaccaaauccuggc

SEQ ID NO: 74446 - RNA, 21 nt, Artificial Sequence
  Chemically synthesized
cuaacaauucgcucaacaaca

SEQ ID NO: 74447 - RNA, 21 nt, Artificial Sequence
  Chemically synthesized
ucugugccaggagcauaaccu

SEQ ID NO: 74448 - RNA, 21 nt, Artificial Sequence
  Chemically synthesized
ugaaacauuccuggcaauagg

SEQ ID NO: 74449 - RNA, 21 nt, Artificial Sequence
  Chemically synthesized
acccgauggcaauacaaaauc

SEQ ID NO: 74450 - RNA, 21 nt, Artificial Sequence
  Chemically synthesized
aaugaaggcccacuaugugcc

SEQ ID NO: 74451 - RNA, 21 nt, Artificial Sequence
  Chemically synthesized
uccugcgugguucuuuccauc

SEQ ID NO: 74452 - RNA, 21 nt, Artificial Sequence
  Chemically synthesized
aucuucggcaacuuuucuuua

SEQ ID NO: 74453 - RNA, 21 nt, Artificial Sequence
  Chemically synthesized
acuugagcaagagccucgaug

SEQ ID NO: 74454 - RNA, 21 nt, Artificial Sequence
  Chemically synthesized
uggacgucauagcccaaaagc

SEQ ID NO: 74455 - RNA, 21 nt, Artificial Sequence
  Chemically synthesized
cuucacuugucaggcucuuca

SEQ ID NO: 74456 - RNA, 21 nt, Artificial Sequence
  Chemically synthesized
uauucagacaucuccuugcac

SEQ ID NO: 74457 - RNA, 21 nt, Artificial Sequence
  Chemically synthesized
ucagagaaacaaccaacgaaa

SEQ ID NO: 74458 - RNA, 21 nt, Artificial Sequence
  Chemically synthesized
ucucucaaauacuuccauacu

SEQ ID NO: 74459 - RNA, 21 nt, Artificial Sequence
  Chemically synthesized
uucuuccuggccuucucugau

SEQ ID NO: 74460 - RNA, 21 nt, Artificial Sequence
  Chemically synthesized
agauggacguuucucaggaag

SEQ ID NO: 74461 - RNA, 21 nt, Artificial Sequence
  Chemically synthesized
auguccuucuccagaagaugu

SEQ ID NO: 74462 - RNA, 21 nt, Artificial Sequence
  Chemically synthesized
ucaaagagcugaaaaaccucu

SEQ ID NO: 74463 - RNA, 21 nt, Artificial Sequence
  Chemically synthesized
ucuaucacaccuccugugguc

SEQ ID NO: 74464 - RNA, 21 nt, Artificial Sequence
  Chemically synthesized
ugcagguugauugaaugaaag

SEQ ID NO: 74465 - RNA, 21 nt, Artificial Sequence
  Chemically synthesized
ucucauaaaccaaggugaaga

SEQ ID NO: 74466 - RNA, 21 nt, Artificial Sequence
  Chemically synthesized
auuugguggcagcagccaaca

SEQ ID NO: 74467 - RNA, 21 nt, Artificial Sequence
  Chemically synthesized
aagggagagagauggacguuu

SEQ ID NO: 74468 - RNA, 21 nt, Artificial Sequence
  Chemically synthesized
uccuguaaagcaggauucuag

SEQ ID NO: 74469 - RNA, 21 nt, Artificial Sequence
  Chemically synthesized
ugccagcuggaaguguguuug

SEQ ID NO: 74470 - RNA, 21 nt, Artificial Sequence
  Chemically synthesized
ugcaaccuauaugccagcugg

SEQ ID NO: 74471 - RNA, 21 nt, Artificial Sequence
  Chemically synthesized
ucgcucaacaacagcuguuug

SEQ ID NO: 74472 - RNA, 21 nt, Artificial Sequence
  Chemically synthesized
uuugcuagggaccaugggaga

SEQ ID NO: 74473 - RNA, 21 nt, Artificial Sequence
  Chemically synthesized
uuucucuccagugaagugcac

SEQ ID NO: 74474 - RNA, 21 nt, Artificial Sequence
  Chemically synthesized
uugaaugaaagugggaauagu

SEQ ID NO: 74475 - RNA, 21 nt, Artificial Sequence
  Chemically synthesized
ucacaagcccgcucagaaaac

SEQ ID NO: 74476 - RNA, 21 nt, Artificial Sequence
  Chemically synthesized
uguucuaacaauucgcucaac

SEQ ID NO: 74477 - RNA, 21 nt, Artificial Sequence
  Chemically synthesized
uugcuucuucagagccaaaag

SEQ ID NO: 74478 - RNA, 21 nt, Artificial Sequence
  Chemically synthesized
augagcucccucauuuccaag

SEQ ID NO: 74479 - RNA, 21 nt, Artificial Sequence
  Chemically synthesized
uaacauguauggcacugaaau

SEQ ID NO: 74480 - RNA, 21 nt, Artificial Sequence
  Chemically synthesized
cacauaauaucaaaggagagu

SEQ ID NO: 74481 - RNA, 21 nt, Artificial Sequence
  Chemically synthesized
ugggaauaguaagggagagag

SEQ ID NO: 74482 - RNA, 21 nt, Artificial Sequence
  Chemically synthesized
cuuccaaacucucacucuagg

SEQ ID NO: 74483 - RNA, 21 nt, Artificial Sequence
  Chemically synthesized
ucauguuugcuucuucagagc

SEQ ID NO: 74484 - RNA, 21 nt, Artificial Sequence
  Chemically synthesized
ugagacuuccaugggcaaaga

SEQ ID NO: 74485 - RNA, 21 nt, Artificial Sequence
  Chemically synthesized
uucuucagagccaaaagauaa

SEQ ID NO: 74486 - RNA, 21 nt, Artificial Sequence
  Chemically synthesized
ucacagaaaaggagcuggccu

SEQ ID NO: 74487 - RNA, 21 nt, Artificial Sequence
  Chemically synthesized
ugcauuuccugugcagucugg

SEQ ID NO: 74488 - RNA, 21 nt, Artificial Sequence
  Chemically synthesized
cagagucuagggaaacacacc

SEQ ID NO: 74489 - RNA, 21 nt, Artificial Sequence
  Chemically synthesized
uggauaaaagcaaaacacaug

SEQ ID NO: 74490 - RNA, 21 nt, Artificial Sequence
  Chemically synthesized
uuuguucuguaggcuugggca

SEQ ID NO: 74491 - RNA, 21 nt, Artificial Sequence
  Chemically synthesized
gucaagacuugaggaagaagg

SEQ ID NO: 74492 - RNA, 21 nt, Artificial Sequence
  Chemically synthesized
ugaagugcagguugauugaau

SEQ ID NO: 74493 - RNA, 21 nt, Artificial Sequence
  Chemically synthesized
uauaugccagcuggaagugug

SEQ ID NO: 74494 - RNA, 21 nt, Artificial Sequence
  Chemically synthesized
ucuucccucuuuuauucaaca

SEQ ID NO: 74495 - RNA, 21 nt, Artificial Sequence
  Chemically synthesized
aaccaguucucauaaaccaag

SEQ ID NO: 74496 - RNA, 21 nt, Artificial Sequence
  Chemically synthesized
uuuggacaccuuccaaacucu

SEQ ID NO: 74497 - RNA, 21 nt, Artificial Sequence
  Chemically synthesized
aaugcaaggcaauguuggcug

SEQ ID NO: 74498 - RNA, 21 nt, Artificial Sequence
  Chemically synthesized
ucuccagaagauguucuaaca

SEQ ID NO: 74499 - RNA, 21 nt, Artificial Sequence
  Chemically synthesized
uccacauucuggcugaaacug

SEQ ID NO: 74500 - RNA, 21 nt, Artificial Sequence
  Chemically synthesized
agagauggacguuucucagga

SEQ ID NO: 74501 - RNA, 21 nt, Artificial Sequence
  Chemically synthesized
agaucaaaggcucuaucacac

SEQ ID NO: 74502 - RNA, 21 nt, Artificial Sequence
  Chemically synthesized
auacaaaauccuggcaguggg

SEQ ID NO: 74503 - RNA, 21 nt, Artificial Sequence
  Chemically synthesized
uaccaggaaccucguuuggug

SEQ ID NO: 74504 - RNA, 21 nt, Artificial Sequence
  Chemically synthesized
ucaggaaggaaaaagacagag

SEQ ID NO: 74505 - RNA, 21 nt, Artificial Sequence
  Chemically synthesized
gucauguuugcuucuucagag

SEQ ID NO: 74506 - RNA, 21 nt, Artificial Sequence
  Chemically synthesized
auuguagcuaagguuggcuug

SEQ ID NO: 74507 - RNA, 21 nt, Artificial Sequence
  Chemically synthesized
ugggaguggaaagguucucuc

SEQ ID NO: 74508 - RNA, 21 nt, Artificial Sequence
  Chemically synthesized
aaugaaagugggaauaguaag

SEQ ID NO: 74509 - RNA, 21 nt, Artificial Sequence
  Chemically synthesized
ucuuggagcuggagcaguuuc

SEQ ID NO: 74510 - RNA, 21 nt, Artificial Sequence
  Chemically synthesized
acaagguuucugcccucauuu

SEQ ID NO: 74511 - RNA, 21 nt, Artificial Sequence
  Chemically synthesized
acaucuuugagcauuuacaug

SEQ ID NO: 74512 - RNA, 21 nt, Artificial Sequence
  Chemically synthesized
ucuuaaagaacagggaaguug

SEQ ID NO: 74513 - RNA, 21 nt, Artificial Sequence
  Chemically synthesized
ugauccuguaaagcaggauuc

SEQ ID NO: 74514 - RNA, 21 nt, Artificial Sequence
  Chemically synthesized
ucugcaguuucucuugcauuu

SEQ ID NO: 74515 - RNA, 21 nt, Artificial Sequence
  Chemically synthesized
uugagacuuccaugggcaaag

SEQ ID NO: 74516 - RNA, 21 nt, Artificial Sequence
  Chemically synthesized
uggcugaaacugcccacuuug

SEQ ID NO: 74517 - RNA, 21 nt, Artificial Sequence
  Chemically synthesized
acuacuacaggccuagcauuu

SEQ ID NO: 74518 - RNA, 21 nt, Artificial Sequence
  Chemically synthesized
cuuagcaagaaaucaccauuu

SEQ ID NO: 74519 - RNA, 21 nt, Artificial Sequence
  Chemically synthesized
cuucccgauccuugauaagug

SEQ ID NO: 74520 - RNA, 21 nt, Artificial Sequence
  Chemically synthesized
ugaaaugaagguaaagaaggg

SEQ ID NO: 74521 - RNA, 21 nt, Artificial Sequence
  Chemically synthesized
agcaaaacacauggaaaaaca

SEQ ID NO: 74522 - RNA, 21 nt, Artificial Sequence
  Chemically synthesized
acaagauguggugacagacac

SEQ ID NO: 74523 - RNA, 21 nt, Artificial Sequence
  Chemically synthesized
cucaucuucggcaacuuuucu

SEQ ID NO: 74524 - RNA, 21 nt, Artificial Sequence
  Chemically synthesized
caugauaugucuucaaggagc

SEQ ID NO: 74525 - RNA, 21 nt, Artificial Sequence
  Chemically synthesized
uugggaaguuucagauaagca

SEQ ID NO: 74526 - RNA, 21 nt, Artificial Sequence
  Chemically synthesized
auaucaugucugagcgcgugg

SEQ ID NO: 74527 - RNA, 21 nt, Artificial Sequence
  Chemically synthesized
accauuuaaugagguucaagg

SEQ ID NO: 74528 - RNA, 21 nt, Artificial Sequence
  Chemically synthesized
aucuccuugcaccgguggaau

SEQ ID NO: 74529 - RNA, 21 nt, Artificial Sequence
  Chemically synthesized
ucggccacgugcauaucacaa

SEQ ID NO: 74530 - RNA, 21 nt, Artificial Sequence
  Chemically synthesized
aaaagcuggaacugaacacaa

SEQ ID NO: 74531 - RNA, 21 nt, Artificial Sequence
  Chemically synthesized
aggcucauuucaguaacaaag

SEQ ID NO: 74532 - RNA, 21 nt, Artificial Sequence
  Chemically synthesized
gugguuacagagucuagggaa

SEQ ID NO: 74533 - RNA, 21 nt, Artificial Sequence
  Chemically synthesized
uccaaggugaugauguccuuc

SEQ ID NO: 74534 - RNA, 21 nt, Artificial Sequence
  Chemically synthesized
ucacaaaccacccaaacaaau

SEQ ID NO: 74535 - RNA, 21 nt, Artificial Sequence
  Chemically synthesized
uuguagcuaagguuggcuugc

SEQ ID NO: 74536 - RNA, 21 nt, Artificial Sequence
  Chemically synthesized
ugaggaagaaggacaccaccu

SEQ ID NO: 74537 - RNA, 21 nt, Artificial Sequence
  Chemically synthesized
ucgauguaccaggaaccucgu

SEQ ID NO: 74538 - RNA, 21 nt, Artificial Sequence
  Chemically synthesized
aaaaagacagagaggugguua

SEQ ID NO: 74539 - RNA, 21 nt, Artificial Sequence
  Chemically synthesized
ugucaaagagcugaaaaaccu

SEQ ID NO: 74540 - RNA, 21 nt, Artificial Sequence
  Chemically synthesized
ucuagauaugaagugcagguu

SEQ ID NO: 74541 - RNA, 21 nt, Artificial Sequence
  Chemically synthesized
acaauaacauguauggcacug

SEQ ID NO: 74542 - RNA, 21 nt, Artificial Sequence
  Chemically synthesized
auuaaauuuggacaccuucca

SEQ ID NO: 74543 - RNA, 21 nt, Artificial Sequence
  Chemically synthesized
ugaagaucaaaggcucuauca

SEQ ID NO: 74544 - RNA, 21 nt, Artificial Sequence
  Chemically synthesized
acuguguuuacaacuucacuu

SEQ ID NO: 74545 - RNA, 21 nt, Artificial Sequence
  Chemically synthesized
cauagaacauggacgucauag

SEQ ID NO: 74546 - RNA, 21 nt, Artificial Sequence
  Chemically synthesized
cauuuauuuggcacccgaugg

SEQ ID NO: 74547 - RNA, 21 nt, Artificial Sequence
  Chemically synthesized
cuuuucuuuaccggcaucacu

SEQ ID NO: 74548 - RNA, 21 nt, Artificial Sequence
  Chemically synthesized
gcgaaauuccaguucuuucuc

SEQ ID NO: 74549 - RNA, 21 nt, Artificial Sequence
  Chemically synthesized
uucuggacacugcagcaaggu

SEQ ID NO: 74550 - RNA, 21 nt, Artificial Sequence
  Chemically synthesized
uucaaggagcuaaaaaugcca

SEQ ID NO: 74551 - RNA, 21 nt, Artificial Sequence
  Chemically synthesized
ccucuuaggcagcaaguugag

SEQ ID NO: 74552 - RNA, 21 nt, Artificial Sequence
  Chemically synthesized
cuggcaauagguccaaccaag

SEQ ID NO: 74553 - RNA, 21 nt, Artificial Sequence
  Chemically synthesized
uuggcguugucaaagagcuga

SEQ ID NO: 74554 - RNA, 21 nt, Artificial Sequence
  Chemically synthesized
uggaggaagaaagaauggaag

SEQ ID NO: 74555 - RNA, 21 nt, Artificial Sequence
  Chemically synthesized
aaaaccucuuggagcuggagc

SEQ ID NO: 74556 - RNA, 21 nt, Artificial Sequence
  Chemically synthesized
aucacaagcccgcucagaaaa

SEQ ID NO: 74557 - RNA, 21 nt, Artificial Sequence
  Chemically synthesized
acgucauagcccaaaagcuug

SEQ ID NO: 74558 - RNA, 21 nt, Artificial Sequence
  Chemically synthesized
uucgcucaacaacagcuguuu

SEQ ID NO: 74559 - RNA, 21 nt, Artificial Sequence
  Chemically synthesized
uuauuuggcacccgauggcaa

SEQ ID NO: 74560 - RNA, 21 nt, Artificial Sequence
  Chemically synthesized
ugaugaugaggaugcaugcca

SEQ ID NO: 74561 - RNA, 21 nt, Artificial Sequence
  Chemically synthesized
agaagcugagaggagaccacu

SEQ ID NO: 74562 - RNA, 21 nt, Artificial Sequence
  Chemically synthesized
uguuaugugagaacagacugg

SEQ ID NO: 74563 - RNA, 21 nt, Artificial Sequence
  Chemically synthesized
ugaagagggugacuagaguac

SEQ ID NO: 74564 - RNA, 21 nt, Artificial Sequence
  Chemically synthesized
uaguaagggagagagauggac

SEQ ID NO: 74565 - RNA, 21 nt, Artificial Sequence
  Chemically synthesized
auguggugacagacacagaag

SEQ ID NO: 74566 - RNA, 21 nt, Artificial Sequence
  Chemically synthesized
cauucuuccuggccuucucug

SEQ ID NO: 74567 - RNA, 21 nt, Artificial Sequence
  Chemically synthesized
cuguguuuacaacuucacuug

SEQ ID NO: 74568 - RNA, 21 nt, Artificial Sequence
  Chemically synthesized
ucaguaacaaagcucagagaa

SEQ ID NO: 74569 - RNA, 21 nt, Artificial Sequence
  Chemically synthesized
aagaucaaaggcucuaucaca

SEQ ID NO: 74570 - RNA, 21 nt, Artificial Sequence
  Chemically synthesized
uaugccagcuggaaguguguu

SEQ ID NO: 74571 - RNA, 21 nt, Artificial Sequence
  Chemically synthesized
uggagcaguuucccauccaca

SEQ ID NO: 74572 - RNA, 21 nt, Artificial Sequence
  Chemically synthesized
ucuguuaugugagaacagacu

SEQ ID NO: 74573 - RNA, 21 nt, Artificial Sequence
  Chemically synthesized
acauuuaaugaaggcccacua

SEQ ID NO: 74574 - RNA, 21 nt, Artificial Sequence
  Chemically synthesized
aagacuugaggaagaaggaca

SEQ ID NO: 74575 - RNA, 21 nt, Artificial Sequence
  Chemically synthesized
augaugggcacaggaaacaag

SEQ ID NO: 74576 - RNA, 21 nt, Artificial Sequence
  Chemically synthesized
uuaucucacacaugauauguc

SEQ ID NO: 74577 - RNA, 21 nt, Artificial Sequence
  Chemically synthesized
uugucaggcucuucaacugca

SEQ ID NO: 74578 - RNA, 21 nt, Artificial Sequence
  Chemically synthesized
ugccuucuucccucuuuuauu

SEQ ID NO: 74579 - RNA, 23 nt, Artificial Sequence
  Chemically synthesized
gaauuuuaucaaacacacuucca

SEQ ID NO: 74580 - RNA, 23 nt, Artificial Sequence
  Chemically synthesized
cuuugacaacgccaacugcccaa

SEQ ID NO: 74581 - RNA, 23 nt, Artificial Sequence
  Chemically synthesized
caaagugggcaguuucagccaga

SEQ ID NO: 74582 - RNA, 23 nt, Artificial Sequence
  Chemically synthesized
ggaaaugcaagagaaacugcaga

SEQ ID NO: 74583 - RNA, 23 nt, Artificial Sequence
  Chemically synthesized
cauguuauuguuuucaaccuaga

SEQ ID NO: 74584 - RNA, 23 nt, Artificial Sequence
  Chemically synthesized
gauagagccuuugaucuucagga

SEQ ID NO: 74585 - RNA, 23 nt, Artificial Sequence
  Chemically synthesized
ucuuuuggcucugaagaagcaaa

SEQ ID NO: 74586 - RNA, 23 nt, Artificial Sequence
  Chemically synthesized
cugugaagcccuuugccuguaga

SEQ ID NO: 74587 - RNA, 23 nt, Artificial Sequence
  Chemically synthesized
cuaugugaccagacugcacagga

SEQ ID NO: 74588 - RNA, 23 nt, Artificial Sequence
  Chemically synthesized
uuguuagaacaucuucuggagaa

SEQ ID NO: 74589 - RNA, 23 nt, Artificial Sequence
  Chemically synthesized
ucuugguccaccuuccagcacaa

SEQ ID NO: 74590 - RNA, 23 nt, Artificial Sequence
  Chemically synthesized
uuguauugccaucgggugccaaa

SEQ ID NO: 74591 - RNA, 23 nt, Artificial Sequence
  Chemically synthesized
cauuuguaccuuauugaucuuug

SEQ ID NO: 74592 - RNA, 23 nt, Artificial Sequence
  Chemically synthesized
agaauuccaccggugcaaggaga

SEQ ID NO: 74593 - RNA, 23 nt, Artificial Sequence
  Chemically synthesized
guguuuucugagcgggcuuguga

SEQ ID NO: 74594 - RNA, 23 nt, Artificial Sequence
  Chemically synthesized
guauugccaucgggugccaaaua

SEQ ID NO: 74595 - RNA, 23 nt, Artificial Sequence
  Chemically synthesized
uauugggaguguguggcaugcau

SEQ ID NO: 74596 - RNA, 23 nt, Artificial Sequence
  Chemically synthesized
uaugcggcuaugccugccucaaa

SEQ ID NO: 74597 - RNA, 23 nt, Artificial Sequence
  Chemically synthesized
cugaauuuuaucaaacacacuuc

SEQ ID NO: 74598 - RNA, 23 nt, Artificial Sequence
  Chemically synthesized
gauaacuuccuucacaucuccca

SEQ ID NO: 74599 - RNA, 23 nt, Artificial Sequence
  Chemically synthesized
caggaaaugcaagagaaacugca

SEQ ID NO: 74600 - RNA, 23 nt, Artificial Sequence
  Chemically synthesized
ucagcugcaguugaagagccuga

SEQ ID NO: 74601 - RNA, 23 nt, Artificial Sequence
  Chemically synthesized
gaccuauugccaggaauguuuca

SEQ ID NO: 74602 - RNA, 23 nt, Artificial Sequence
  Chemically synthesized
gaauuguuagaacaucuucugga

SEQ ID NO: 74603 - RNA, 23 nt, Artificial Sequence
  Chemically synthesized
gcucuugcucaaguguuuucuga

SEQ ID NO: 74604 - RNA, 23 nt, Artificial Sequence
  Chemically synthesized
agaaccgaguggugcuagccaaa

SEQ ID NO: 74605 - RNA, 23 nt, Artificial Sequence
  Chemically synthesized
uugguuggaccuauugccaggaa

SEQ ID NO: 74606 - RNA, 23 nt, Artificial Sequence
  Chemically synthesized
aaagaaccgaguggugcuagcca

SEQ ID NO: 74607 - RNA, 23 nt, Artificial Sequence
  Chemically synthesized
cuuucauucaaucaaccugcacu

SEQ ID NO: 74608 - RNA, 23 nt, Artificial Sequence
  Chemically synthesized
caucucugccuuugaguguggga

SEQ ID NO: 74609 - RNA, 23 nt, Artificial Sequence
  Chemically synthesized
aguauuugagagagagaaccuuu

SEQ ID NO: 74610 - RNA, 23 nt, Artificial Sequence
  Chemically synthesized
uguuuucaaccuagaaaccuuua

SEQ ID NO: 74611 - RNA, 23 nt, Artificial Sequence
  Chemically synthesized
cuuguuuguuuuauucaccauca

SEQ ID NO: 74612 - RNA, 23 nt, Artificial Sequence
  Chemically synthesized
cacuuucauucaaucaaccugca

SEQ ID NO: 74613 - RNA, 23 nt, Artificial Sequence
  Chemically synthesized
caauaaauauuuguuuggguggu

SEQ ID NO: 74614 - RNA, 23 nt, Artificial Sequence
  Chemically synthesized
acauguuauuguuuucaaccuag

SEQ ID NO: 74615 - RNA, 23 nt, Artificial Sequence
  Chemically synthesized
ccaagagguuuuucagcucuuug

SEQ ID NO: 74616 - RNA, 23 nt, Artificial Sequence
  Chemically synthesized
acacuuccagcuggcauauaggu

SEQ ID NO: 74617 - RNA, 23 nt, Artificial Sequence
  Chemically synthesized
guuuguuuuauucaccaucaugu

SEQ ID NO: 74618 - RNA, 23 nt, Artificial Sequence
  Chemically synthesized
aguggugcuagccaaacagcugu

SEQ ID NO: 74619 - RNA, 23 nt, Artificial Sequence
  Chemically synthesized
gacauaucaugugugagauaacu

SEQ ID NO: 74620 - RNA, 23 nt, Artificial Sequence
  Chemically synthesized
ccuuuugacaauauacacggauu

SEQ ID NO: 74621 - RNA, 23 nt, Artificial Sequence
  Chemically synthesized
gaucuuucguugguuguuucucu

SEQ ID NO: 74622 - RNA, 23 nt, Artificial Sequence
  Chemically synthesized
agcuuuugggcuaugacguccau

SEQ ID NO: 74623 - RNA, 23 nt, Artificial Sequence
  Chemically synthesized
cuuuugggcuaugacguccaugu

SEQ ID NO: 74624 - RNA, 23 nt, Artificial Sequence
  Chemically synthesized
guucuaugugaccagacugcaca

SEQ ID NO: 74625 - RNA, 23 nt, Artificial Sequence
  Chemically synthesized
cuuguuuccugugcccaucaucu

SEQ ID NO: 74626 - RNA, 23 nt, Artificial Sequence
  Chemically synthesized
gagagaaccuuuccacucccacu

SEQ ID NO: 74627 - RNA, 23 nt, Artificial Sequence
  Chemically synthesized
cucuguaaccaccucucugucuu

SEQ ID NO: 74628 - RNA, 23 nt, Artificial Sequence
  Chemically synthesized
uuagaacaucuucuggagaagga

SEQ ID NO: 74629 - RNA, 23 nt, Artificial Sequence
  Chemically synthesized
aagaaccgaguggugcuagccaa

SEQ ID NO: 74630 - RNA, 23 nt, Artificial Sequence
  Chemically synthesized
ccauauuuguguucaguuccagc

SEQ ID NO: 74631 - RNA, 23 nt, Artificial Sequence
  Chemically synthesized
ugaauuuuaucaaacacacuucc

SEQ ID NO: 74632 - RNA, 23 nt, Artificial Sequence
  Chemically synthesized
cauauuuguguucaguuccagcu

SEQ ID NO: 74633 - RNA, 23 nt, Artificial Sequence
  Chemically synthesized
caccuuggaaaugagggagcuca

SEQ ID NO: 74634 - RNA, 23 nt, Artificial Sequence
  Chemically synthesized
gaauuccaccggugcaaggagau

SEQ ID NO: 74635 - RNA, 23 nt, Artificial Sequence
  Chemically synthesized
cuguaaccaccucucugucuuuu

SEQ ID NO: 74636 - RNA, 23 nt, Artificial Sequence
  Chemically synthesized
cuacuucugugucugucaccaca

SEQ ID NO: 74637 - RNA, 23 nt, Artificial Sequence
  Chemically synthesized
ucuagucacccucuucaagcuuu

SEQ ID NO: 74638 - RNA, 23 nt, Artificial Sequence
  Chemically synthesized
ugugauagagccuuugaucuuca

SEQ ID NO: 74639 - RNA, 23 nt, Artificial Sequence
  Chemically synthesized
cccucauuuaaaauguaaacucu

SEQ ID NO: 74640 - RNA, 23 nt, Artificial Sequence
  Chemically synthesized
aucuuugcccauggaagucucaa

SEQ ID NO: 74641 - RNA, 23 nt, Artificial Sequence
  Chemically synthesized
aauuuuaucaaacacacuuccag

SEQ ID NO: 74642 - RNA, 23 nt, Artificial Sequence
  Chemically synthesized
agaaacguccaucucucucccuu

SEQ ID NO: 74643 - RNA, 23 nt, Artificial Sequence
  Chemically synthesized
acaccuggccaggauuugguugu

SEQ ID NO: 74644 - RNA, 23 nt, Artificial Sequence
  Chemically synthesized
auaugcggcuaugccugccucaa

SEQ ID NO: 74645 - RNA, 23 nt, Artificial Sequence
  Chemically synthesized
ucauuaaauggugauuucuugcu

SEQ ID NO: 74646 - RNA, 23 nt, Artificial Sequence
  Chemically synthesized
ccagcuggcauauagguugcagu

SEQ ID NO: 74647 - RNA, 23 nt, Artificial Sequence
  Chemically synthesized
uguauugccaucgggugccaaau

SEQ ID NO: 74648 - RNA, 23 nt, Artificial Sequence
  Chemically synthesized
cauauagguugcagucucggccu

SEQ ID NO: 74649 - RNA, 23 nt, Artificial Sequence
  Chemically synthesized
acucuuggcucguuugggcucaa

SEQ ID NO: 74650 - RNA, 23 nt, Artificial Sequence
  Chemically synthesized
uguuuugcuuuuauccacuggca

SEQ ID NO: 74651 - RNA, 23 nt, Artificial Sequence
  Chemically synthesized
cugucagccaacauugccuugca

SEQ ID NO: 74652 - RNA, 23 nt, Artificial Sequence
  Chemically synthesized
ccaaaucugucuagaauccugcu

SEQ ID NO: 74653 - RNA, 23 nt, Artificial Sequence
  Chemically synthesized
ucaaacacacuuccagcuggcau

SEQ ID NO: 74654 - RNA, 23 nt, Artificial Sequence
  Chemically synthesized
ccaccucucugucuuuuuccuuc

SEQ ID NO: 74655 - RNA, 23 nt, Artificial Sequence
  Chemically synthesized
caacugcccaagccuacagaaca

SEQ ID NO: 74656 - RNA, 23 nt, Artificial Sequence
  Chemically synthesized
cuccaagagguuuuucagcucuu

SEQ ID NO: 74657 - RNA, 23 nt, Artificial Sequence
  Chemically synthesized
gucugaauacugcagcacucugu

SEQ ID NO: 74658 - RNA, 23 nt, Artificial Sequence
  Chemically synthesized
agacucuguaaccaccucucugu

SEQ ID NO: 74659 - RNA, 23 nt, Artificial Sequence
  Chemically synthesized
ucauucaaucaaccugcacuuca

SEQ ID NO: 74660 - RNA, 23 nt, Artificial Sequence
  Chemically synthesized
gguuuaugagaacugguucuugc

SEQ ID NO: 74661 - RNA, 23 nt, Artificial Sequence
  Chemically synthesized
cuagucacccucuucaagcuuuu

SEQ ID NO: 74662 - RNA, 23 nt, Artificial Sequence
  Chemically synthesized
ucuuugacaacgccaacugccca

SEQ ID NO: 74663 - RNA, 23 nt, Artificial Sequence
  Chemically synthesized
uuucauucauauccuccgcccuu

SEQ ID NO: 74664 - RNA, 23 nt, Artificial Sequence
  Chemically synthesized
gcucaauaaauauuuguuugggu

SEQ ID NO: 74665 - RNA, 23 nt, Artificial Sequence
  Chemically synthesized
auuuuaucaaacacacuuccagc

SEQ ID NO: 74666 - RNA, 23 nt, Artificial Sequence
  Chemically synthesized
cuaccuuuugauaaaauguuccu

SEQ ID NO: 74667 - RNA, 23 nt, Artificial Sequence
  Chemically synthesized
aaguguuuucugagcgggcuugu

SEQ ID NO: 74668 - RNA, 23 nt, Artificial Sequence
  Chemically synthesized
cuuuaccuucauuucauccuguu

SEQ ID NO: 74669 - RNA, 23 nt, Artificial Sequence
  Chemically synthesized
cagucuguucucacauaacagag

SEQ ID NO: 74670 - RNA, 23 nt, Artificial Sequence
  Chemically synthesized
cacuuccagcuggcauauagguu

SEQ ID NO: 74671 - RNA, 23 nt, Artificial Sequence
  Chemically synthesized
cuugguuggaccuauugccagga

SEQ ID NO: 74672 - RNA, 23 nt, Artificial Sequence
  Chemically synthesized
acauaucaugugugagauaacuu

SEQ ID NO: 74673 - RNA, 23 nt, Artificial Sequence
  Chemically synthesized
aaguccugccuuugggucgacau

SEQ ID NO: 74674 - RNA, 23 nt, Artificial Sequence
  Chemically synthesized
augugggaaucucccagacuugu

SEQ ID NO: 74675 - RNA, 23 nt, Artificial Sequence
  Chemically synthesized
agauguaauguaguucuuuguuc

SEQ ID NO: 74676 - RNA, 23 nt, Artificial Sequence
  Chemically synthesized
gagaaggccaggaagaauggugu

SEQ ID NO: 74677 - RNA, 23 nt, Artificial Sequence
  Chemically synthesized
cuaaaaaagaaccgaguggugcu

SEQ ID NO: 74678 - RNA, 23 nt, Artificial Sequence
  Chemically synthesized
auguaauguaguucuuuguuccu

SEQ ID NO: 74679 - RNA, 23 nt, Artificial Sequence
  Chemically synthesized
aucucucucccuuacuauuccca

SEQ ID NO: 74680 - RNA, 23 nt, Artificial Sequence
  Chemically synthesized
uuguuuucaaccuagaaaccuuu

SEQ ID NO: 74681 - RNA, 23 nt, Artificial Sequence
  Chemically synthesized
gugauagagccuuugaucuucag

SEQ ID NO: 74682 - RNA, 23 nt, Artificial Sequence
  Chemically synthesized
uaugcuccuggcacagaauucca

SEQ ID NO: 74683 - RNA, 23 nt, Artificial Sequence
  Chemically synthesized
agaugucugagagaccaucuccu

SEQ ID NO: 74684 - RNA, 23 nt, Artificial Sequence
  Chemically synthesized
uaaaaaagaaccgaguggugcua

SEQ ID NO: 74685 - RNA, 23 nt, Artificial Sequence
  Chemically synthesized
agucucaaagaucuuucguuggu

SEQ ID NO: 74686 - RNA, 23 nt, Artificial Sequence
  Chemically synthesized
uuucauucaaucaaccugcacuu

SEQ ID NO: 74687 - RNA, 23 nt, Artificial Sequence
  Chemically synthesized
acuucugugucugucaccacauc

SEQ ID NO: 74688 - RNA, 23 nt, Artificial Sequence
  Chemically synthesized
agucuguucucacauaacagagu

SEQ ID NO: 74689 - RNA, 23 nt, Artificial Sequence
  Chemically synthesized
aucuuuuggcucugaagaagcaa

SEQ ID NO: 74690 - RNA, 23 nt, Artificial Sequence
  Chemically synthesized
gccaaacagcuguuguugagcga

SEQ ID NO: 74691 - RNA, 23 nt, Artificial Sequence
  Chemically synthesized
uccacucccacugccaggauuuu

SEQ ID NO: 74692 - RNA, 23 nt, Artificial Sequence
  Chemically synthesized
uuuguagauggcacuuuagugau

SEQ ID NO: 74693 - RNA, 23 nt, Artificial Sequence
  Chemically synthesized
aauuguuagaacaucuucuggag

SEQ ID NO: 74694 - RNA, 23 nt, Artificial Sequence
  Chemically synthesized
uggaaguguguuugauaaaauuc

SEQ ID NO: 74695 - RNA, 23 nt, Artificial Sequence
  Chemically synthesized
uugggcaguuggcguugucaaag

SEQ ID NO: 74696 - RNA, 23 nt, Artificial Sequence
  Chemically synthesized
ucuggcugaaacugcccacuuug

SEQ ID NO: 74697 - RNA, 23 nt, Artificial Sequence
  Chemically synthesized
ucugcaguuucucuugcauuucc

SEQ ID NO: 74698 - RNA, 23 nt, Artificial Sequence
  Chemically synthesized
ucuagguugaaaacaauaacaug

SEQ ID NO: 74699 - RNA, 23 nt, Artificial Sequence
  Chemically synthesized
uccugaagaucaaaggcucuauc

SEQ ID NO: 74700 - RNA, 23 nt, Artificial Sequence
  Chemically synthesized
uuugcuucuucagagccaaaaga

SEQ ID NO: 74701 - RNA, 23 nt, Artificial Sequence
  Chemically synthesized
ucuacaggcaaagggcuucacag

SEQ ID NO: 74702 - RNA, 23 nt, Artificial Sequence
  Chemically synthesized
uccugugcagucuggucacauag

SEQ ID NO: 74703 - RNA, 23 nt, Artificial Sequence
  Chemically synthesized
uucuccagaagauguucuaacaa

SEQ ID NO: 74704 - RNA, 23 nt, Artificial Sequence
  Chemically synthesized
uugugcuggaagguggaccaaga

SEQ ID NO: 74705 - RNA, 23 nt, Artificial Sequence
  Chemically synthesized
uuuggcacccgauggcaauacaa

SEQ ID NO: 74706 - RNA, 23 nt, Artificial Sequence
  Chemically synthesized
caaagaucaauaagguacaaaug

SEQ ID NO: 74707 - RNA, 23 nt, Artificial Sequence
  Chemically synthesized
ucuccuugcaccgguggaauucu

SEQ ID NO: 74708 - RNA, 23 nt, Artificial Sequence
  Chemically synthesized
ucacaagcccgcucagaaaacac

SEQ ID NO: 74709 - RNA, 23 nt, Artificial Sequence
  Chemically synthesized
uauuuggcacccgauggcaauac

SEQ ID NO: 74710 - RNA, 23 nt, Artificial Sequence
  Chemically synthesized
augcaugccacacacucccaaua

SEQ ID NO: 74711 - RNA, 23 nt, Artificial Sequence
  Chemically synthesized
uuugaggcaggcauagccgcaua

SEQ ID NO: 74712 - RNA, 23 nt, Artificial Sequence
  Chemically synthesized
gaaguguguuugauaaaauucag

SEQ ID NO: 74713 - RNA, 23 nt, Artificial Sequence
  Chemically synthesized
ugggagaugugaaggaaguuauc

SEQ ID NO: 74714 - RNA, 23 nt, Artificial Sequence
  Chemically synthesized
ugcaguuucucuugcauuuccug

SEQ ID NO: 74715 - RNA, 23 nt, Artificial Sequence
  Chemically synthesized
ucaggcucuucaacugcagcuga

SEQ ID NO: 74716 - RNA, 23 nt, Artificial Sequence
  Chemically synthesized
ugaaacauuccuggcaauagguc

SEQ ID NO: 74717 - RNA, 23 nt, Artificial Sequence
  Chemically synthesized
uccagaagauguucuaacaauuc

SEQ ID NO: 74718 - RNA, 23 nt, Artificial Sequence
  Chemically synthesized
ucagaaaacacuugagcaagagc

SEQ ID NO: 74719 - RNA, 23 nt, Artificial Sequence
  Chemically synthesized
uuuggcuagcaccacucgguucu

SEQ ID NO: 74720 - RNA, 23 nt, Artificial Sequence
  Chemically synthesized
uuccuggcaauagguccaaccaa

SEQ ID NO: 74721 - RNA, 23 nt, Artificial Sequence
  Chemically synthesized
uggcuagcaccacucgguucuuu

SEQ ID NO: 74722 - RNA, 23 nt, Artificial Sequence
  Chemically synthesized
agugcagguugauugaaugaaag

SEQ ID NO: 74723 - RNA, 23 nt, Artificial Sequence
  Chemically synthesized
ucccacacucaaaggcagagaug

SEQ ID NO: 74724 - RNA, 23 nt, Artificial Sequence
  Chemically synthesized
aaagguucucucucucaaauacu

SEQ ID NO: 74725 - RNA, 23 nt, Artificial Sequence
  Chemically synthesized
uaaagguuucuagguugaaaaca

SEQ ID NO: 74726 - RNA, 23 nt, Artificial Sequence
  Chemically synthesized
ugauggugaauaaaacaaacaag

SEQ ID NO: 74727 - RNA, 23 nt, Artificial Sequence
  Chemically synthesized
ugcagguugauugaaugaaagug

SEQ ID NO: 74728 - RNA, 23 nt, Artificial Sequence
  Chemically synthesized
accacccaaacaaauauuuauug

SEQ ID NO: 74729 - RNA, 23 nt, Artificial Sequence
  Chemically synthesized
cuagguugaaaacaauaacaugu

SEQ ID NO: 74730 - RNA, 23 nt, Artificial Sequence
  Chemically synthesized
caaagagcugaaaaaccucuugg

SEQ ID NO: 74731 - RNA, 23 nt, Artificial Sequence
  Chemically synthesized
accuauaugccagcuggaagugu

SEQ ID NO: 74732 - RNA, 23 nt, Artificial Sequence
  Chemically synthesized
acaugauggugaauaaaacaaac

SEQ ID NO: 74733 - RNA, 23 nt, Artificial Sequence
  Chemically synthesized
acagcuguuuggcuagcaccacu

SEQ ID NO: 74734 - RNA, 23 nt, Artificial Sequence
  Chemically synthesized
aguuaucucacacaugauauguc

SEQ ID NO: 74735 - RNA, 23 nt, Artificial Sequence
  Chemically synthesized
aauccguguauauugucaaaagg

SEQ ID NO: 74736 - RNA, 23 nt, Artificial Sequence
  Chemically synthesized
agagaaacaaccaacgaaagauc

SEQ ID NO: 74737 - RNA, 23 nt, Artificial Sequence
  Chemically synthesized
auggacgucauagcccaaaagcu

SEQ ID NO: 74738 - RNA, 23 nt, Artificial Sequence
  Chemically synthesized
acauggacgucauagcccaaaag

SEQ ID NO: 74739 - RNA, 23 nt, Artificial Sequence
  Chemically synthesized
ugugcagucuggucacauagaac

SEQ ID NO: 74740 - RNA, 23 nt, Artificial Sequence
  Chemically synthesized
agaugaugggcacaggaaacaag

SEQ ID NO: 74741 - RNA, 23 nt, Artificial Sequence
  Chemically synthesized
agugggaguggaaagguucucuc

SEQ ID NO: 74742 - RNA, 23 nt, Artificial Sequence
  Chemically synthesized
aagacagagaggugguuacagag

SEQ ID NO: 74743 - RNA, 23 nt, Artificial Sequence
  Chemically synthesized
uccuucuccagaagauguucuaa

SEQ ID NO: 74744 - RNA, 23 nt, Artificial Sequence
  Chemically synthesized
uuggcuagcaccacucgguucuu

SEQ ID NO: 74745 - RNA, 23 nt, Artificial Sequence
  Chemically synthesized
gcuggaacugaacacaaauaugg

SEQ ID NO: 74746 - RNA, 23 nt, Artificial Sequence
  Chemically synthesized
ggaaguguguuugauaaaauuca

SEQ ID NO: 74747 - RNA, 23 nt, Artificial Sequence
  Chemically synthesized
agcuggaacugaacacaaauaug

SEQ ID NO: 74748 - RNA, 23 nt, Artificial Sequence
  Chemically synthesized
ugagcucccucauuuccaaggug

SEQ ID NO: 74749 - RNA, 23 nt, Artificial Sequence
  Chemically synthesized
aucuccuugcaccgguggaauuc

SEQ ID NO: 74750 - RNA, 23 nt, Artificial Sequence
  Chemically synthesized
aaaagacagagaggugguuacag

SEQ ID NO: 74751 - RNA, 23 nt, Artificial Sequence
  Chemically synthesized
uguggugacagacacagaaguag

SEQ ID NO: 74752 - RNA, 23 nt, Artificial Sequence
  Chemically synthesized
aaagcuugaagagggugacuaga

SEQ ID NO: 74753 - RNA, 23 nt, Artificial Sequence
  Chemically synthesized
ugaagaucaaaggcucuaucaca

SEQ ID NO: 74754 - RNA, 23 nt, Artificial Sequence
  Chemically synthesized
agaguuuacauuuuaaaugaggg

SEQ ID NO: 74755 - RNA, 23 nt, Artificial Sequence
  Chemically synthesized
uugagacuuccaugggcaaagau

SEQ ID NO: 74756 - RNA, 23 nt, Artificial Sequence
  Chemically synthesized
cuggaaguguguuugauaaaauu

SEQ ID NO: 74757 - RNA, 23 nt, Artificial Sequence
  Chemically synthesized
aagggagagagauggacguuucu

SEQ ID NO: 74758 - RNA, 23 nt, Artificial Sequence
  Chemically synthesized
acaaccaaauccuggccaggugu

SEQ ID NO: 74759 - RNA, 23 nt, Artificial Sequence
  Chemically synthesized
uugaggcaggcauagccgcauau

SEQ ID NO: 74760 - RNA, 23 nt, Artificial Sequence
  Chemically synthesized
agcaagaaaucaccauuuaauga

SEQ ID NO: 74761 - RNA, 23 nt, Artificial Sequence
  Chemically synthesized
acugcaaccuauaugccagcugg

SEQ ID NO: 74762 - RNA, 23 nt, Artificial Sequence
  Chemically synthesized
auuuggcacccgauggcaauaca

SEQ ID NO: 74763 - RNA, 23 nt, Artificial Sequence
  Chemically synthesized
aggccgagacugcaaccuauaug

SEQ ID NO: 74764 - RNA, 23 nt, Artificial Sequence
  Chemically synthesized
uugagcccaaacgagccaagagu

SEQ ID NO: 74765 - RNA, 23 nt, Artificial Sequence
  Chemically synthesized
ugccaguggauaaaagcaaaaca

SEQ ID NO: 74766 - RNA, 23 nt, Artificial Sequence
  Chemically synthesized
ugcaaggcaauguuggcugacag

SEQ ID NO: 74767 - RNA, 23 nt, Artificial Sequence
  Chemically synthesized
agcaggauucuagacagauuugg

SEQ ID NO: 74768 - RNA, 23 nt, Artificial Sequence
  Chemically synthesized
augccagcuggaaguguguuuga

SEQ ID NO: 74769 - RNA, 23 nt, Artificial Sequence
  Chemically synthesized
gaaggaaaaagacagagaggugg

SEQ ID NO: 74770 - RNA, 23 nt, Artificial Sequence
  Chemically synthesized
uguucuguaggcuugggcaguug

SEQ ID NO: 74771 - RNA, 23 nt, Artificial Sequence
  Chemically synthesized
aagagcugaaaaaccucuuggag

SEQ ID NO: 74772 - RNA, 23 nt, Artificial Sequence
  Chemically synthesized
acagagugcugcaguauucagac

SEQ ID NO: 74773 - RNA, 23 nt, Artificial Sequence
  Chemically synthesized
acagagaggugguuacagagucu

SEQ ID NO: 74774 - RNA, 23 nt, Artificial Sequence
  Chemically synthesized
ugaagugcagguugauugaauga

SEQ ID NO: 74775 - RNA, 23 nt, Artificial Sequence
  Chemically synthesized
gcaagaaccaguucucauaaacc

SEQ ID NO: 74776 - RNA, 23 nt, Artificial Sequence
  Chemically synthesized
aaaagcuugaagagggugacuag

SEQ ID NO: 74777 - RNA, 23 nt, Artificial Sequence
  Chemically synthesized
ugggcaguuggcguugucaaaga

SEQ ID NO: 74778 - RNA, 23 nt, Artificial Sequence
  Chemically synthesized
aagggcggaggauaugaaugaaa

SEQ ID NO: 74779 - RNA, 23 nt, Artificial Sequence
  Chemically synthesized
acccaaacaaauauuuauugagc

SEQ ID NO: 74780 - RNA, 23 nt, Artificial Sequence
  Chemically synthesized
gcuggaaguguguuugauaaaau

SEQ ID NO: 74781 - RNA, 23 nt, Artificial Sequence
  Chemically synthesized
aggaacauuuuaucaaaagguag

SEQ ID NO: 74782 - RNA, 23 nt, Artificial Sequence
  Chemically synthesized
acaagcccgcucagaaaacacuu

SEQ ID NO: 74783 - RNA, 23 nt, Artificial Sequence
  Chemically synthesized
aacaggaugaaaugaagguaaag

SEQ ID NO: 74784 - RNA, 23 nt, Artificial Sequence
  Chemically synthesized
cucuguuaugugagaacagacug

SEQ ID NO: 74785 - RNA, 23 nt, Artificial Sequence
  Chemically synthesized
aaccuauaugccagcuggaagug

SEQ ID NO: 74786 - RNA, 23 nt, Artificial Sequence
  Chemically synthesized
uccuggcaauagguccaaccaag

SEQ ID NO: 74787 - RNA, 23 nt, Artificial Sequence
  Chemically synthesized
aaguuaucucacacaugauaugu

SEQ ID NO: 74788 - RNA, 23 nt, Artificial Sequence
  Chemically synthesized
augucgacccaaaggcaggacuu

SEQ ID NO: 74789 - RNA, 23 nt, Artificial Sequence
  Chemically synthesized
acaagucugggagauucccacau

SEQ ID NO: 74790 - RNA, 23 nt, Artificial Sequence
  Chemically synthesized
gaacaaagaacuacauuacaucu

SEQ ID NO: 74791 - RNA, 23 nt, Artificial Sequence
  Chemically synthesized
acaccauucuuccuggccuucuc

SEQ ID NO: 74792 - RNA, 23 nt, Artificial Sequence
  Chemically synthesized
agcaccacucgguucuuuuuuag

SEQ ID NO: 74793 - RNA, 23 nt, Artificial Sequence
  Chemically synthesized
aggaacaaagaacuacauuacau

SEQ ID NO: 74794 - RNA, 23 nt, Artificial Sequence
  Chemically synthesized
ugggaauaguaagggagagagau

SEQ ID NO: 74795 - RNA, 23 nt, Artificial Sequence
  Chemically synthesized
aaagguuucuagguugaaaacaa

SEQ ID NO: 74796 - RNA, 23 nt, Artificial Sequence
  Chemically synthesized
cugaagaucaaaggcucuaucac

SEQ ID NO: 74797 - RNA, 23 nt, Artificial Sequence
  Chemically synthesized
uggaauucugugccaggagcaua

SEQ ID NO: 74798 - RNA, 23 nt, Artificial Sequence
  Chemically synthesized
aggagauggucucucagacaucu

SEQ ID NO: 74799 - RNA, 23 nt, Artificial Sequence
  Chemically synthesized
uagcaccacucgguucuuuuuua

SEQ ID NO: 74800 - RNA, 23 nt, Artificial Sequence
  Chemically synthesized
accaacgaaagaucuuugagacu

SEQ ID NO: 74801 - RNA, 23 nt, Artificial Sequence
  Chemically synthesized
aagugcagguugauugaaugaaa

SEQ ID NO: 74802 - RNA, 23 nt, Artificial Sequence
  Chemically synthesized
gauguggugacagacacagaagu

SEQ ID NO: 74803 - RNA, 23 nt, Artificial Sequence
  Chemically synthesized
acucuguuaugugagaacagacu

SEQ ID NO: 74804 - RNA, 23 nt, Artificial Sequence
  Chemically synthesized
uugcuucuucagagccaaaagau

SEQ ID NO: 74805 - RNA, 23 nt, Artificial Sequence
  Chemically synthesized
ucgcucaacaacagcuguuuggc

SEQ ID NO: 74806 - RNA, 23 nt, Artificial Sequence
  Chemically synthesized
aaaauccuggcagugggagugga

SEQ ID NO: 74807 - RNA, 23 nt, Artificial Sequence
  Chemically synthesized
aucacuaaagugccaucuacaaa

SEQ ID NO: 74808 - RNA, 23 nt, Artificial Sequence
  Chemically synthesized
cuccagaagauguucuaacaauu

SEQ ID NO: 74809 - RNA, 23 nt, Artificial Sequence
  Chemically synthesized
guauuaaacucuccuuugauauu

SEQ ID NO: 74810 - RNA, 23 nt, Artificial Sequence
  Chemically synthesized
aguauuaaacucuccuuugauau

SEQ ID NO: 74811 - RNA, 23 nt, Artificial Sequence
  Chemically synthesized
caguauuaaacucuccuuugaua

SEQ ID NO: 74812 - RNA, 23 nt, Artificial Sequence
  Chemically synthesized
cauaucucucccuucuuuaccuu

SEQ ID NO: 74813 - RNA, 23 nt, Artificial Sequence
  Chemically synthesized
ucauaucucucccuucuuuaccu

SEQ ID NO: 74814 - RNA, 23 nt, Artificial Sequence
  Chemically synthesized
uucauaucucucccuucuuuacc

SEQ ID NO: 74815 - RNA, 23 nt, Artificial Sequence
  Chemically synthesized
cuucauaucucucccuucuuuac

SEQ ID NO: 74816 - RNA, 23 nt, Artificial Sequence
  Chemically synthesized
gcuucauaucucucccuucuuua

SEQ ID NO: 74817 - RNA, 23 nt, Artificial Sequence
  Chemically synthesized
ggagagugaugccgguaaagaaa

SEQ ID NO: 74818 - RNA, 23 nt, Artificial Sequence
  Chemically synthesized
aggagagugaugccgguaaagaa

SEQ ID NO: 74819 - RNA, 23 nt, Artificial Sequence
  Chemically synthesized
gaggagagugaugccgguaaaga

SEQ ID NO: 74820 - RNA, 23 nt, Artificial Sequence
  Chemically synthesized
cgaggagagugaugccgguaaag

SEQ ID NO: 74821 - RNA, 23 nt, Artificial Sequence
  Chemically synthesized
gcgaggagagugaugccgguaaa

SEQ ID NO: 74822 - RNA, 23 nt, Artificial Sequence
  Chemically synthesized
uuaucucccugcuucauaucucu

SEQ ID NO: 74823 - RNA, 23 nt, Artificial Sequence
  Chemically synthesized
cuuaucucccugcuucauaucuc

SEQ ID NO: 74824 - RNA, 23 nt, Artificial Sequence
  Chemically synthesized
gcuuaucucccugcuucauaucu

SEQ ID NO: 74825 - RNA, 23 nt, Artificial Sequence
  Chemically synthesized
agcuuaucucccugcuucauauc

SEQ ID NO: 74826 - RNA, 23 nt, Artificial Sequence
  Chemically synthesized
uagcuuaucucccugcuucauau

SEQ ID NO: 74827 - RNA, 23 nt, Artificial Sequence
  Chemically synthesized
cucccugcuucauaucucucccu

SEQ ID NO: 74828 - RNA, 23 nt, Artificial Sequence
  Chemically synthesized
ucucccugcuucauaucucuccc

SEQ ID NO: 74829 - RNA, 23 nt, Artificial Sequence
  Chemically synthesized
aucucccugcuucauaucucucc

SEQ ID NO: 74830 - RNA, 23 nt, Artificial Sequence
  Chemically synthesized
uaucucccugcuucauaucucuc

SEQ ID NO: 74831 - RNA, 23 nt, Artificial Sequence
  Chemically synthesized
ugcuucauaucucucccuucuuu

SEQ ID NO: 74832 - RNA, 23 nt, Artificial Sequence
  Chemically synthesized
acugcacaggaaaugcaagagaa

SEQ ID NO: 74833 - RNA, 23 nt, Artificial Sequence
  Chemically synthesized
cugcuucauaucucucccuucuu

SEQ ID NO: 74834 - RNA, 23 nt, Artificial Sequence
  Chemically synthesized
ccugcuucauaucucucccuucu

SEQ ID NO: 74835 - RNA, 23 nt, Artificial Sequence
  Chemically synthesized
cccugcuucauaucucucccuuc

SEQ ID NO: 74836 - RNA, 23 nt, Artificial Sequence
  Chemically synthesized
uaugugaccagacugcacaggaa

SEQ ID NO: 74837 - RNA, 23 nt, Artificial Sequence
  Chemically synthesized
uucaaucaaccugcacuucauau

SEQ ID NO: 74838 - RNA, 23 nt, Artificial Sequence
  Chemically synthesized
auucaaucaaccugcacuucaua

SEQ ID NO: 74839 - RNA, 23 nt, Artificial Sequence
  Chemically synthesized
cauucaaucaaccugcacuucau

SEQ ID NO: 74840 - RNA, 23 nt, Artificial Sequence
  Chemically synthesized
caacuucccuguucuuuaagacu

SEQ ID NO: 74841 - RNA, 23 nt, Artificial Sequence
  Chemically synthesized
ccaacuucccuguucuuuaagac

SEQ ID NO: 74842 - RNA, 23 nt, Artificial Sequence
  Chemically synthesized
cccaacuucccuguucuuuaaga

SEQ ID NO: 74843 - RNA, 23 nt, Artificial Sequence
  Chemically synthesized
ucccaacuucccuguucuuuaag

SEQ ID NO: 74844 - RNA, 23 nt, Artificial Sequence
  Chemically synthesized
uucccaacuucccuguucuuuaa

SEQ ID NO: 74845 - RNA, 23 nt, Artificial Sequence
  Chemically synthesized
cagagaaggccaggaagaauggu

SEQ ID NO: 74846 - RNA, 23 nt, Artificial Sequence
  Chemically synthesized
ucagagaaggccaggaagaaugg

SEQ ID NO: 74847 - RNA, 23 nt, Artificial Sequence
  Chemically synthesized
aucagagaaggccaggaagaaug

SEQ ID NO: 74848 - RNA, 23 nt, Artificial Sequence
  Chemically synthesized
caucagagaaggccaggaagaau

SEQ ID NO: 74849 - RNA, 23 nt, Artificial Sequence
  Chemically synthesized
gcaucagagaaggccaggaagaa

SEQ ID NO: 74850 - RNA, 23 nt, Artificial Sequence
  Chemically synthesized
ugcaaggagaugucugaauacug

SEQ ID NO: 74851 - RNA, 23 nt, Artificial Sequence
  Chemically synthesized
gugcaaggagaugucugaauacu

SEQ ID NO: 74852 - RNA, 23 nt, Artificial Sequence
  Chemically synthesized
ggugcaaggagaugucugaauac

SEQ ID NO: 74853 - RNA, 23 nt, Artificial Sequence
  Chemically synthesized
cggugcaaggagaugucugaaua

SEQ ID NO: 74854 - RNA, 23 nt, Artificial Sequence
  Chemically synthesized
ccggugcaaggagaugucugaau

SEQ ID NO: 74855 - RNA, 23 nt, Artificial Sequence
  Chemically synthesized
accggugcaaggagaugucugaa

SEQ ID NO: 74856 - RNA, 23 nt, Artificial Sequence
  Chemically synthesized
caccggugcaaggagaugucuga

SEQ ID NO: 74857 - RNA, 23 nt, Artificial Sequence
  Chemically synthesized
agggaagaaggcaagccaaccuu

SEQ ID NO: 74858 - RNA, 23 nt, Artificial Sequence
  Chemically synthesized
gagggaagaaggcaagccaaccu

SEQ ID NO: 74859 - RNA, 23 nt, Artificial Sequence
  Chemically synthesized
agagggaagaaggcaagccaacc

SEQ ID NO: 74860 - RNA, 23 nt, Artificial Sequence
  Chemically synthesized
aagagggaagaaggcaagccaac

SEQ ID NO: 74861 - RNA, 23 nt, Artificial Sequence
  Chemically synthesized
aaagagggaagaaggcaagccaa

SEQ ID NO: 74862 - RNA, 23 nt, Artificial Sequence
  Chemically synthesized
caucgaggcucuugcucaagugu

SEQ ID NO: 74863 - RNA, 23 nt, Artificial Sequence
  Chemically synthesized
acaucgaggcucuugcucaagug

SEQ ID NO: 74864 - RNA, 23 nt, Artificial Sequence
  Chemically synthesized
uacaucgaggcucuugcucaagu

SEQ ID NO: 74865 - RNA, 23 nt, Artificial Sequence
  Chemically synthesized
guacaucgaggcucuugcucaag

SEQ ID NO: 74866 - RNA, 23 nt, Artificial Sequence
  Chemically synthesized
gguacaucgaggcucuugcucaa

SEQ ID NO: 74867 - RNA, 23 nt, Artificial Sequence
  Chemically synthesized
gcacuucacuggagagaaagaac

SEQ ID NO: 74868 - RNA, 23 nt, Artificial Sequence
  Chemically synthesized
gaaggacaucaucaccuuggaaa

SEQ ID NO: 74869 - RNA, 23 nt, Artificial Sequence
  Chemically synthesized
ccaccaaaucugucuagaauccu

SEQ ID NO: 74870 - RNA, 23 nt, Artificial Sequence
  Chemically synthesized
cguccaucucucucccuuacuau

SEQ ID NO: 74871 - RNA, 23 nt, Artificial Sequence
  Chemically synthesized
acguccaucucucucccuuacua

SEQ ID NO: 74872 - RNA, 23 nt, Artificial Sequence
  Chemically synthesized
aacguccaucucucucccuuacu

SEQ ID NO: 74873 - RNA, 23 nt, Artificial Sequence
  Chemically synthesized
aaacguccaucucucucccuuac

SEQ ID NO: 74874 - RNA, 23 nt, Artificial Sequence
  Chemically synthesized
gaaacguccaucucucucccuua

SEQ ID NO: 74875 - RNA, 23 nt, Artificial Sequence
  Chemically synthesized
cuucccaacuucccuguucuuua

SEQ ID NO: 74876 - RNA, 23 nt, Artificial Sequence
  Chemically synthesized
ucccugcuucauaucucucccuu

SEQ ID NO: 74877 - RNA, 23 nt, Artificial Sequence
  Chemically synthesized
guguuucccuagacucuguaacc

SEQ ID NO: 74878 - RNA, 23 nt, Artificial Sequence
  Chemically synthesized
uguguuucccuagacucuguaac

SEQ ID NO: 74879 - RNA, 23 nt, Artificial Sequence
  Chemically synthesized
guguguuucccuagacucuguaa

SEQ ID NO: 74880 - RNA, 23 nt, Artificial Sequence
  Chemically synthesized
cucccuucuuuaccuucauuuca

SEQ ID NO: 74881 - RNA, 23 nt, Artificial Sequence
  Chemically synthesized
ucucccuucuuuaccuucauuuc

SEQ ID NO: 74882 - RNA, 23 nt, Artificial Sequence
  Chemically synthesized
cucucccuucuuuaccuucauuu

SEQ ID NO: 74883 - RNA, 23 nt, Artificial Sequence
  Chemically synthesized
ucucucccuucuuuaccuucauu

SEQ ID NO: 74884 - RNA, 23 nt, Artificial Sequence
  Chemically synthesized
aucucucccuucuuuaccuucau

SEQ ID NO: 74885 - RNA, 23 nt, Artificial Sequence
  Chemically synthesized
ccaucucucucccuuacuauucc

SEQ ID NO: 74886 - RNA, 23 nt, Artificial Sequence
  Chemically synthesized
uccaucucucucccuuacuauuc

SEQ ID NO: 74887 - RNA, 23 nt, Artificial Sequence
  Chemically synthesized
guccaucucucucccuuacuauu

SEQ ID NO: 74888 - RNA, 23 nt, Artificial Sequence
  Chemically synthesized
gcccauggaagucucaaagaucu

SEQ ID NO: 74889 - RNA, 23 nt, Artificial Sequence
  Chemically synthesized
gggagagggcauauaaauucccc

SEQ ID NO: 74890 - RNA, 23 nt, Artificial Sequence
  Chemically synthesized
ggggagagggcauauaaauuccc

SEQ ID NO: 74891 - RNA, 23 nt, Artificial Sequence
  Chemically synthesized
uggggagagggcauauaaauucc

SEQ ID NO: 74892 - RNA, 23 nt, Artificial Sequence
  Chemically synthesized
auggggagagggcauauaaauuc

SEQ ID NO: 74893 - RNA, 23 nt, Artificial Sequence
  Chemically synthesized
uauggggagagggcauauaaauu

SEQ ID NO: 74894 - RNA, 23 nt, Artificial Sequence
  Chemically synthesized
cuagagugagaguuuggaaggug

SEQ ID NO: 74895 - RNA, 23 nt, Artificial Sequence
  Chemically synthesized
ccuagagugagaguuuggaaggu

SEQ ID NO: 74896 - RNA, 23 nt, Artificial Sequence
  Chemically synthesized
uccuagagugagaguuuggaagg

SEQ ID NO: 74897 - RNA, 23 nt, Artificial Sequence
  Chemically synthesized
guccuagagugagaguuuggaag

SEQ ID NO: 74898 - RNA, 23 nt, Artificial Sequence
  Chemically synthesized
uguccuagagugagaguuuggaa

SEQ ID NO: 74899 - RNA, 23 nt, Artificial Sequence
  Chemically synthesized
gaguggugcuagccaaacagcug

SEQ ID NO: 74900 - RNA, 23 nt, Artificial Sequence
  Chemically synthesized
cgaguggugcuagccaaacagcu

SEQ ID NO: 74901 - RNA, 23 nt, Artificial Sequence
  Chemically synthesized
ccgaguggugcuagccaaacagc

SEQ ID NO: 74902 - RNA, 23 nt, Artificial Sequence
  Chemically synthesized
accgaguggugcuagccaaacag

SEQ ID NO: 74903 - RNA, 23 nt, Artificial Sequence
  Chemically synthesized
aaccgaguggugcuagccaaaca

SEQ ID NO: 74904 - RNA, 23 nt, Artificial Sequence
  Chemically synthesized
acucuccuuugauauuauguggc

SEQ ID NO: 74905 - RNA, 23 nt, Artificial Sequence
  Chemically synthesized
aacucuccuuugauauuaugugg

SEQ ID NO: 74906 - RNA, 23 nt, Artificial Sequence
  Chemically synthesized
aaacucuccuuugauauuaugug

SEQ ID NO: 74907 - RNA, 23 nt, Artificial Sequence
  Chemically synthesized
uaaacucuccuuugauauuaugu

SEQ ID NO: 74908 - RNA, 23 nt, Artificial Sequence
  Chemically synthesized
uuaaacucuccuuugauauuaug

SEQ ID NO: 74909 - RNA, 23 nt, Artificial Sequence
  Chemically synthesized
cugucuuuuuccuuccugagaaa

SEQ ID NO: 74910 - RNA, 23 nt, Artificial Sequence
  Chemically synthesized
ucugucuuuuuccuuccugagaa

SEQ ID NO: 74911 - RNA, 23 nt, Artificial Sequence
  Chemically synthesized
cucugucuuuuuccuuccugaga

SEQ ID NO: 74912 - RNA, 23 nt, Artificial Sequence
  Chemically synthesized
ucucugucuuuuuccuuccugag

SEQ ID NO: 74913 - RNA, 23 nt, Artificial Sequence
  Chemically synthesized
cucucugucuuuuuccuuccuga

SEQ ID NO: 74914 - RNA, 23 nt, Artificial Sequence
  Chemically synthesized
caggaagaaugguguguuucccu

SEQ ID NO: 74915 - RNA, 23 nt, Artificial Sequence
  Chemically synthesized
ccaggaagaaugguguguuuccc

SEQ ID NO: 74916 - RNA, 23 nt, Artificial Sequence
  Chemically synthesized
gccaggaagaaugguguguuucc

SEQ ID NO: 74917 - RNA, 23 nt, Artificial Sequence
  Chemically synthesized
ggccaggaagaaugguguguuuc

SEQ ID NO: 74918 - RNA, 23 nt, Artificial Sequence
  Chemically synthesized
aggccaggaagaaugguguguuu

SEQ ID NO: 74919 - RNA, 23 nt, Artificial Sequence
  Chemically synthesized
aaaagagggaagaaggcaagcca

SEQ ID NO: 74920 - RNA, 23 nt, Artificial Sequence
  Chemically synthesized
uaaaagagggaagaaggcaagcc

SEQ ID NO: 74921 - RNA, 23 nt, Artificial Sequence
  Chemically synthesized
auaaaagagggaagaaggcaagc

SEQ ID NO: 74922 - RNA, 23 nt, Artificial Sequence
  Chemically synthesized
aauaaaagagggaagaaggcaag

SEQ ID NO: 74923 - RNA, 23 nt, Artificial Sequence
  Chemically synthesized
agcaucagagaaggccaggaaga

SEQ ID NO: 74924 - RNA, 23 nt, Artificial Sequence
  Chemically synthesized
gagcaucagagaaggccaggaag

SEQ ID NO: 74925 - RNA, 23 nt, Artificial Sequence
  Chemically synthesized
ggagcaucagagaaggccaggaa

SEQ ID NO: 74926 - RNA, 23 nt, Artificial Sequence
  Chemically synthesized
gacugcacaggaaaugcaagaga

SEQ ID NO: 74927 - RNA, 23 nt, Artificial Sequence
  Chemically synthesized
agacugcacaggaaaugcaagag

SEQ ID NO: 74928 - RNA, 23 nt, Artificial Sequence
  Chemically synthesized
cagacugcacaggaaaugcaaga

SEQ ID NO: 74929 - RNA, 23 nt, Artificial Sequence
  Chemically synthesized
uaucucucccuucuuuaccuuca

SEQ ID NO: 74930 - RNA, 23 nt, Artificial Sequence
  Chemically synthesized
auaucucucccuucuuuaccuuc

SEQ ID NO: 74931 - RNA, 23 nt, Artificial Sequence
  Chemically synthesized
aagaagcaaacaugacuagagac

SEQ ID NO: 74932 - RNA, 23 nt, Artificial Sequence
  Chemically synthesized
gaagaagcaaacaugacuagaga

SEQ ID NO: 74933 - RNA, 23 nt, Artificial Sequence
  Chemically synthesized
gaguuuggaagguguccaaauuu

SEQ ID NO: 74934 - RNA, 23 nt, Artificial Sequence
  Chemically synthesized
agaguuuggaagguguccaaauu

SEQ ID NO: 74935 - RNA, 23 nt, Artificial Sequence
  Chemically synthesized
gagaguuuggaagguguccaaau

SEQ ID NO: 74936 - RNA, 23 nt, Artificial Sequence
  Chemically synthesized
ugagaguuuggaagguguccaaa

SEQ ID NO: 74937 - RNA, 23 nt, Artificial Sequence
  Chemically synthesized
gugagaguuuggaagguguccaa

SEQ ID NO: 74938 - RNA, 23 nt, Artificial Sequence
  Chemically synthesized
gaaaaguugccgaagaugagacu

SEQ ID NO: 74939 - RNA, 23 nt, Artificial Sequence
  Chemically synthesized
agaaaaguugccgaagaugagac

SEQ ID NO: 74940 - RNA, 23 nt, Artificial Sequence
  Chemically synthesized
aagaaaaguugccgaagaugaga

SEQ ID NO: 74941 - RNA, 23 nt, Artificial Sequence
  Chemically synthesized
aaagaaaaguugccgaagaugag

SEQ ID NO: 74942 - RNA, 23 nt, Artificial Sequence
  Chemically synthesized
uaaagaaaaguugccgaagauga

SEQ ID NO: 74943 - RNA, 23 nt, Artificial Sequence
  Chemically synthesized
cucuagucacccucuucaagcuu

SEQ ID NO: 74944 - RNA, 23 nt, Artificial Sequence
  Chemically synthesized
acucuagucacccucuucaagcu

SEQ ID NO: 74945 - RNA, 23 nt, Artificial Sequence
  Chemically synthesized
uacucuagucacccucuucaagc

SEQ ID NO: 74946 - RNA, 23 nt, Artificial Sequence
  Chemically synthesized
ggcuuuuauuucagugccauaca

SEQ ID NO: 74947 - RNA, 23 nt, Artificial Sequence
  Chemically synthesized
uggcuuuuauuucagugccauac

SEQ ID NO: 74948 - RNA, 23 nt, Artificial Sequence
  Chemically synthesized
guggcuuuuauuucagugccaua

SEQ ID NO: 74949 - RNA, 23 nt, Artificial Sequence
  Chemically synthesized
cuagcuuaucucccugcuucaua

SEQ ID NO: 74950 - RNA, 23 nt, Artificial Sequence
  Chemically synthesized
cuugcugcaguguccagaagcgg

SEQ ID NO: 74951 - RNA, 23 nt, Artificial Sequence
  Chemically synthesized
ccuugcugcaguguccagaagcg

SEQ ID NO: 74952 - RNA, 23 nt, Artificial Sequence
  Chemically synthesized
accuugcugcaguguccagaagc

SEQ ID NO: 74953 - RNA, 23 nt, Artificial Sequence
  Chemically synthesized
caccuugcugcaguguccagaag

SEQ ID NO: 74954 - RNA, 23 nt, Artificial Sequence
  Chemically synthesized
gcaccuugcugcaguguccagaa

SEQ ID NO: 74955 - RNA, 23 nt, Artificial Sequence
  Chemically synthesized
acuuaucaaggaucgggaagguu

SEQ ID NO: 74956 - RNA, 23 nt, Artificial Sequence
  Chemically synthesized
cgccaucuaugguguggauggga

SEQ ID NO: 74957 - RNA, 23 nt, Artificial Sequence
  Chemically synthesized
gcgccaucuaugguguggauggg

SEQ ID NO: 74958 - RNA, 23 nt, Artificial Sequence
  Chemically synthesized
ggcgccaucuaugguguggaugg

SEQ ID NO: 74959 - RNA, 23 nt, Artificial Sequence
  Chemically synthesized
gggcgccaucuaugguguggaug

SEQ ID NO: 74960 - RNA, 23 nt, Artificial Sequence
  Chemically synthesized
agggcgccaucuaugguguggau

SEQ ID NO: 74961 - RNA, 23 nt, Artificial Sequence
  Chemically synthesized
uuuuguagauggcacuuuaguga

SEQ ID NO: 74962 - RNA, 23 nt, Artificial Sequence
  Chemically synthesized
caaugugcacuucacuggagaga

SEQ ID NO: 74963 - RNA, 23 nt, Artificial Sequence
  Chemically synthesized
gcaaugugcacuucacuggagag

SEQ ID NO: 74964 - RNA, 23 nt, Artificial Sequence
  Chemically synthesized
agcaaugugcacuucacuggaga

SEQ ID NO: 74965 - RNA, 23 nt, Artificial Sequence
  Chemically synthesized
gagcaaugugcacuucacuggag

SEQ ID NO: 74966 - RNA, 23 nt, Artificial Sequence
  Chemically synthesized
ugagcaaugugcacuucacugga

SEQ ID NO: 74967 - RNA, 23 nt, Artificial Sequence
  Chemically synthesized
aaacgagguuccugguacaucga

SEQ ID NO: 74968 - RNA, 23 nt, Artificial Sequence
  Chemically synthesized
ccuagcuuaucucccugcuucau

SEQ ID NO: 74969 - RNA, 23 nt, Artificial Sequence
  Chemically synthesized
guaaaugcucaaagauguaaugu

SEQ ID NO: 74970 - RNA, 23 nt, Artificial Sequence
  Chemically synthesized
uguaaaugcucaaagauguaaug

SEQ ID NO: 74971 - RNA, 23 nt, Artificial Sequence
  Chemically synthesized
auguaaaugcucaaagauguaau

SEQ ID NO: 74972 - RNA, 23 nt, Artificial Sequence
  Chemically synthesized
ccuuuuuguccuagagugagagu

SEQ ID NO: 74973 - RNA, 23 nt, Artificial Sequence
  Chemically synthesized
cacacuuccagcuggcauauagg

SEQ ID NO: 74974 - RNA, 23 nt, Artificial Sequence
  Chemically synthesized
acacacuuccagcuggcauauag

SEQ ID NO: 74975 - RNA, 23 nt, Artificial Sequence
  Chemically synthesized
aacacacuuccagcuggcauaua

SEQ ID NO: 74976 - RNA, 23 nt, Artificial Sequence
  Chemically synthesized
aaacacacuuccagcuggcauau

SEQ ID NO: 74977 - RNA, 23 nt, Artificial Sequence
  Chemically synthesized
caaacacacuuccagcuggcaua

SEQ ID NO: 74978 - RNA, 23 nt, Artificial Sequence
  Chemically synthesized
ugcgaggagagugaugccgguaa

SEQ ID NO: 74979 - RNA, 23 nt, Artificial Sequence
  Chemically synthesized
gggguugaccaacaagauggaaa

SEQ ID NO: 74980 - RNA, 23 nt, Artificial Sequence
  Chemically synthesized
ugggguugaccaacaagauggaa

SEQ ID NO: 74981 - RNA, 23 nt, Artificial Sequence
  Chemically synthesized
gugggguugaccaacaagaugga

SEQ ID NO: 74982 - RNA, 23 nt, Artificial Sequence
  Chemically synthesized
uccuagcuuaucucccugcuuca

SEQ ID NO: 74983 - RNA, 23 nt, Artificial Sequence
  Chemically synthesized
cauugccuugcauuuguaccuua

SEQ ID NO: 74984 - RNA, 23 nt, Artificial Sequence
  Chemically synthesized
acuggaauuucgcucuggagggg

SEQ ID NO: 74985 - RNA, 23 nt, Artificial Sequence
  Chemically synthesized
aacuggaauuucgcucuggaggg

SEQ ID NO: 74986 - RNA, 23 nt, Artificial Sequence
  Chemically synthesized
uuacauuaguuaagaugucugag

SEQ ID NO: 74987 - RNA, 23 nt, Artificial Sequence
  Chemically synthesized
aacugcccaagccuacagaacaa

SEQ ID NO: 74988 - RNA, 23 nt, Artificial Sequence
  Chemically synthesized
cuuugaucuucaggaugcacggu

SEQ ID NO: 74989 - RNA, 23 nt, Artificial Sequence
  Chemically synthesized
ccuuugaucuucaggaugcacgg

SEQ ID NO: 74990 - RNA, 23 nt, Artificial Sequence
  Chemically synthesized
cuuuuuccuuccugagaaacguc

SEQ ID NO: 74991 - RNA, 23 nt, Artificial Sequence
  Chemically synthesized
ucuuuuuccuuccugagaaacgu

SEQ ID NO: 74992 - RNA, 23 nt, Artificial Sequence
  Chemically synthesized
gucuuuuuccuuccugagaaacg

SEQ ID NO: 74993 - RNA, 23 nt, Artificial Sequence
  Chemically synthesized
ugucuuuuuccuuccugagaaac

SEQ ID NO: 74994 - RNA, 23 nt, Artificial Sequence
  Chemically synthesized
ggcucugaagaagcaaacaugac

SEQ ID NO: 74995 - RNA, 23 nt, Artificial Sequence
  Chemically synthesized
uggcucugaagaagcaaacauga

SEQ ID NO: 74996 - RNA, 23 nt, Artificial Sequence
  Chemically synthesized
aguuaagaugucugagagaccau

SEQ ID NO: 74997 - RNA, 23 nt, Artificial Sequence
  Chemically synthesized
uaguuaagaugucugagagacca

SEQ ID NO: 74998 - RNA, 23 nt, Artificial Sequence
  Chemically synthesized
uggcaugcauccucaucaucagg

SEQ ID NO: 74999 - RNA, 23 nt, Artificial Sequence
  Chemically synthesized
guggcaugcauccucaucaucag

SEQ ID NO: 75000 - RNA, 23 nt, Artificial Sequence
  Chemically synthesized
ucaacuugcugccuaagaggggu

SEQ ID NO: 75001 - RNA, 23 nt, Artificial Sequence
  Chemically synthesized
cucaacuugcugccuaagagggg

SEQ ID NO: 75002 - RNA, 23 nt, Artificial Sequence
  Chemically synthesized
ccucaacuugcugccuaagaggg

SEQ ID NO: 75003 - RNA, 23 nt, Artificial Sequence
  Chemically synthesized
caccaaaucugucuagaauccug

SEQ ID NO: 75004 - RNA, 23 nt, Artificial Sequence
  Chemically synthesized
augcugguuaaggugaacgcacu

SEQ ID NO: 75005 - RNA, 23 nt, Artificial Sequence
  Chemically synthesized
caugcugguuaaggugaacgcac

SEQ ID NO: 75006 - RNA, 23 nt, Artificial Sequence
  Chemically synthesized
ggacacucuuggcucguuugggc

SEQ ID NO: 75007 - RNA, 23 nt, Artificial Sequence
  Chemically synthesized
cuuuaucccugcuuaucugaaac

SEQ ID NO: 75008 - RNA, 23 nt, Artificial Sequence
  Chemically synthesized
ccuuuaucccugcuuaucugaaa

SEQ ID NO: 75009 - RNA, 23 nt, Artificial Sequence
  Chemically synthesized
uguggcaugcauccucaucauca

SEQ ID NO: 75010 - RNA, 23 nt, Artificial Sequence
  Chemically synthesized
gagguuccugguacaucgaggcu

SEQ ID NO: 75011 - RNA, 23 nt, Artificial Sequence
  Chemically synthesized
cgagguuccugguacaucgaggc

SEQ ID NO: 75012 - RNA, 23 nt, Artificial Sequence
  Chemically synthesized
acgagguuccugguacaucgagg

SEQ ID NO: 75013 - RNA, 23 nt, Artificial Sequence
  Chemically synthesized
aacgagguuccugguacaucgag

SEQ ID NO: 75014 - RNA, 23 nt, Artificial Sequence
  Chemically synthesized
cuuccuccagucuguucucacau

SEQ ID NO: 75015 - RNA, 23 nt, Artificial Sequence
  Chemically synthesized
ucuuccuccagucuguucucaca

SEQ ID NO: 75016 - RNA, 23 nt, Artificial Sequence
  Chemically synthesized
uuguccuagagugagaguuugga

SEQ ID NO: 75017 - RNA, 23 nt, Artificial Sequence
  Chemically synthesized
cuuugagugugggacuccaggcc

SEQ ID NO: 75018 - RNA, 23 nt, Artificial Sequence
  Chemically synthesized
ccuuugagugugggacuccaggc

SEQ ID NO: 75019 - RNA, 23 nt, Artificial Sequence
  Chemically synthesized
gccuuugagugugggacuccagg

SEQ ID NO: 75020 - RNA, 23 nt, Artificial Sequence
  Chemically synthesized
ugccuuugagugugggacuccag

SEQ ID NO: 75021 - RNA, 23 nt, Artificial Sequence
  Chemically synthesized
cugccuuugagugugggacucca

SEQ ID NO: 75022 - RNA, 23 nt, Artificial Sequence
  Chemically synthesized
caggccagcuccuuuucugugaa

SEQ ID NO: 75023 - RNA, 23 nt, Artificial Sequence
  Chemically synthesized
aaaccuuuaucccugcuuaucug

SEQ ID NO: 75024 - RNA, 23 nt, Artificial Sequence
  Chemically synthesized
cuuaucaaggaucgggaagguua

SEQ ID NO: 75025 - RNA, 23 nt, Artificial Sequence
  Chemically synthesized
cuucaggaugcacgguuucuguu

SEQ ID NO: 75026 - RNA, 23 nt, Artificial Sequence
  Chemically synthesized
uugugagccuugcugccaagucc

SEQ ID NO: 75027 - RNA, 23 nt, Artificial Sequence
  Chemically synthesized
uuugugagccuugcugccaaguc

SEQ ID NO: 75028 - RNA, 23 nt, Artificial Sequence
  Chemically synthesized
guuugugagccuugcugccaagu

SEQ ID NO: 75029 - RNA, 23 nt, Artificial Sequence
  Chemically synthesized
gguuugugagccuugcugccaag

SEQ ID NO: 75030 - RNA, 23 nt, Artificial Sequence
  Chemically synthesized
ugguuugugagccuugcugccaa

SEQ ID NO: 75031 - RNA, 23 nt, Artificial Sequence
  Chemically synthesized
gagagagaaccuuuccacuccca

SEQ ID NO: 75032 - RNA, 23 nt, Artificial Sequence
  Chemically synthesized
cagacaugauaugcggcuaugcc

SEQ ID NO: 75033 - RNA, 23 nt, Artificial Sequence
  Chemically synthesized
ucagacaugauaugcggcuaugc

SEQ ID NO: 75034 - RNA, 23 nt, Artificial Sequence
  Chemically synthesized
cucagacaugauaugcggcuaug

SEQ ID NO: 75035 - RNA, 23 nt, Artificial Sequence
  Chemically synthesized
gcucagacaugauaugcggcuau

SEQ ID NO: 75036 - RNA, 23 nt, Artificial Sequence
  Chemically synthesized
cgcucagacaugauaugcggcua

SEQ ID NO: 75037 - RNA, 23 nt, Artificial Sequence
  Chemically synthesized
gguguguuucccuagacucugua

SEQ ID NO: 75038 - RNA, 23 nt, Artificial Sequence
  Chemically synthesized
agugagaguuuggaaggugucca

SEQ ID NO: 75039 - RNA, 23 nt, Artificial Sequence
  Chemically synthesized
gagugagaguuuggaaggugucc

SEQ ID NO: 75040 - RNA, 23 nt, Artificial Sequence
  Chemically synthesized
agagugagaguuuggaagguguc

SEQ ID NO: 75041 - RNA, 23 nt, Artificial Sequence
  Chemically synthesized
uagagugagaguuuggaaggugu

SEQ ID NO: 75042 - RNA, 23 nt, Artificial Sequence
  Chemically synthesized
caacuugcugccuaagagggguc

SEQ ID NO: 75043 - RNA, 23 nt, Artificial Sequence
  Chemically synthesized
agguuuuucagcucuuugacaac

SEQ ID NO: 75044 - RNA, 23 nt, Artificial Sequence
  Chemically synthesized
gagguuuuucagcucuuugacaa

SEQ ID NO: 75045 - RNA, 23 nt, Artificial Sequence
  Chemically synthesized
agagguuuuucagcucuuugaca

SEQ ID NO: 75046 - RNA, 23 nt, Artificial Sequence
  Chemically synthesized
aagagguuuuucagcucuuugac

SEQ ID NO: 75047 - RNA, 23 nt, Artificial Sequence
  Chemically synthesized
caagagguuuuucagcucuuuga

SEQ ID NO: 75048 - RNA, 23 nt, Artificial Sequence
  Chemically synthesized
gaaacugcuccagcuccaagagg

SEQ ID NO: 75049 - RNA, 23 nt, Artificial Sequence
  Chemically synthesized
ggaaacugcuccagcuccaagag

SEQ ID NO: 75050 - RNA, 23 nt, Artificial Sequence
  Chemically synthesized
gggaaacugcuccagcuccaaga

SEQ ID NO: 75051 - RNA, 23 nt, Artificial Sequence
  Chemically synthesized
ugggaaacugcuccagcuccaag

SEQ ID NO: 75052 - RNA, 23 nt, Artificial Sequence
  Chemically synthesized
augggaaacugcuccagcuccaa

SEQ ID NO: 75053 - RNA, 23 nt, Artificial Sequence
  Chemically synthesized
agguuaugcuccuggcacagaau

SEQ ID NO: 75054 - RNA, 23 nt, Artificial Sequence
  Chemically synthesized
aagguuaugcuccuggcacagaa

SEQ ID NO: 75055 - RNA, 23 nt, Artificial Sequence
  Chemically synthesized
gaagguuaugcuccuggcacaga

SEQ ID NO: 75056 - RNA, 23 nt, Artificial Sequence
  Chemically synthesized
ggaagguuaugcuccuggcacag

SEQ ID NO: 75057 - RNA, 23 nt, Artificial Sequence
  Chemically synthesized
gggaagguuaugcuccuggcaca

SEQ ID NO: 75058 - RNA, 23 nt, Artificial Sequence
  Chemically synthesized
ucuuuguuccugcuuucucuuuc

SEQ ID NO: 75059 - RNA, 23 nt, Artificial Sequence
  Chemically synthesized
ugacaauauacacggauuauuau

SEQ ID NO: 75060 - RNA, 23 nt, Artificial Sequence
  Chemically synthesized
uugacaauauacacggauuauua

SEQ ID NO: 75061 - RNA, 23 nt, Artificial Sequence
  Chemically synthesized
uuugacaauauacacggauuauu

SEQ ID NO: 75062 - RNA, 23 nt, Artificial Sequence
  Chemically synthesized
uuuugacaauauacacggauuau

SEQ ID NO: 75063 - RNA, 23 nt, Artificial Sequence
  Chemically synthesized
cuuuugacaauauacacggauua

SEQ ID NO: 75064 - RNA, 23 nt, Artificial Sequence
  Chemically synthesized
ugaacgcacuuaucaaggaucgg

SEQ ID NO: 75065 - RNA, 23 nt, Artificial Sequence
  Chemically synthesized
gugaacgcacuuaucaaggaucg

SEQ ID NO: 75066 - RNA, 23 nt, Artificial Sequence
  Chemically synthesized
ggugaacgcacuuaucaaggauc

SEQ ID NO: 75067 - RNA, 23 nt, Artificial Sequence
  Chemically synthesized
ggaucgggaagguuaugcuccug

SEQ ID NO: 75068 - RNA, 23 nt, Artificial Sequence
  Chemically synthesized
aggaucgggaagguuaugcuccu

SEQ ID NO: 75069 - RNA, 23 nt, Artificial Sequence
  Chemically synthesized
aaggaucgggaagguuaugcucc

SEQ ID NO: 75070 - RNA, 23 nt, Artificial Sequence
  Chemically synthesized
ccacaggaggugugauagagccu

SEQ ID NO: 75071 - RNA, 23 nt, Artificial Sequence
  Chemically synthesized
accacaggaggugugauagagcc

SEQ ID NO: 75072 - RNA, 23 nt, Artificial Sequence
  Chemically synthesized
gaccacaggaggugugauagagc

SEQ ID NO: 75073 - RNA, 23 nt, Artificial Sequence
  Chemically synthesized
ggaccacaggaggugugauagag

SEQ ID NO: 75074 - RNA, 23 nt, Artificial Sequence
  Chemically synthesized
uggaccacaggaggugugauaga

SEQ ID NO: 75075 - RNA, 23 nt, Artificial Sequence
  Chemically synthesized
ggucccuagcaaaaugcuaggcc

SEQ ID NO: 75076 - RNA, 23 nt, Artificial Sequence
  Chemically synthesized
uggucccuagcaaaaugcuaggc

SEQ ID NO: 75077 - RNA, 23 nt, Artificial Sequence
  Chemically synthesized
auggucccuagcaaaaugcuagg

SEQ ID NO: 75078 - RNA, 23 nt, Artificial Sequence
  Chemically synthesized
cauggucccuagcaaaaugcuag

SEQ ID NO: 75079 - RNA, 23 nt, Artificial Sequence
  Chemically synthesized
gaucuuugcccauggaagucuca

SEQ ID NO: 75080 - RNA, 23 nt, Artificial Sequence
  Chemically synthesized
ugaucuuugcccauggaagucuc

SEQ ID NO: 75081 - RNA, 23 nt, Artificial Sequence
  Chemically synthesized
auugaucuuugcccauggaaguc

SEQ ID NO: 75082 - RNA, 23 nt, Artificial Sequence
  Chemically synthesized
uauugaucuuugcccauggaagu

SEQ ID NO: 75083 - RNA, 23 nt, Artificial Sequence
  Chemically synthesized
ccaacaagauggaaagaaccacg

SEQ ID NO: 75084 - RNA, 23 nt, Artificial Sequence
  Chemically synthesized
accaacaagauggaaagaaccac

SEQ ID NO: 75085 - RNA, 23 nt, Artificial Sequence
  Chemically synthesized
gaccaacaagauggaaagaacca

SEQ ID NO: 75086 - RNA, 23 nt, Artificial Sequence
  Chemically synthesized
cuuucuuccuccagucuguucuc

SEQ ID NO: 75087 - RNA, 23 nt, Artificial Sequence
  Chemically synthesized
ucuuucuuccuccagucuguucu

SEQ ID NO: 75088 - RNA, 23 nt, Artificial Sequence
  Chemically synthesized
uucuuucuuccuccagucuguuc

SEQ ID NO: 75089 - RNA, 23 nt, Artificial Sequence
  Chemically synthesized
auucuuucuuccuccagucuguu

SEQ ID NO: 75090 - RNA, 23 nt, Artificial Sequence
  Chemically synthesized
cauucuuucuuccuccagucugu

SEQ ID NO: 75091 - RNA, 23 nt, Artificial Sequence
  Chemically synthesized
ccaacauugccuugcauuuguac

SEQ ID NO: 75092 - RNA, 23 nt, Artificial Sequence
  Chemically synthesized
gccaacauugccuugcauuugua

SEQ ID NO: 75093 - RNA, 23 nt, Artificial Sequence
  Chemically synthesized
agccaacauugccuugcauuugu

SEQ ID NO: 75094 - RNA, 23 nt, Artificial Sequence
  Chemically synthesized
cagccaacauugccuugcauuug

SEQ ID NO: 75095 - RNA, 23 nt, Artificial Sequence
  Chemically synthesized
ucagccaacauugccuugcauuu

SEQ ID NO: 75096 - RNA, 23 nt, Artificial Sequence
  Chemically synthesized
uuuugaugccuucugugaagcac

SEQ ID NO: 75097 - RNA, 23 nt, Artificial Sequence
  Chemically synthesized
cuuuugaugccuucugugaagca

SEQ ID NO: 75098 - RNA, 23 nt, Artificial Sequence
  Chemically synthesized
gcuuuugaugccuucugugaagc

SEQ ID NO: 75099 - RNA, 23 nt, Artificial Sequence
  Chemically synthesized
aaacaugacuagagacgcaccuu

SEQ ID NO: 75100 - RNA, 23 nt, Artificial Sequence
  Chemically synthesized
caaacaugacuagagacgcaccu

SEQ ID NO: 75101 - RNA, 23 nt, Artificial Sequence
  Chemically synthesized
uuuauucaccaucauguaccaag

SEQ ID NO: 75102 - RNA, 23 nt, Artificial Sequence
  Chemically synthesized
uuuuauucaccaucauguaccaa

SEQ ID NO: 75103 - RNA, 23 nt, Artificial Sequence
  Chemically synthesized
guuuuauucaccaucauguacca

SEQ ID NO: 75104 - RNA, 23 nt, Artificial Sequence
  Chemically synthesized
uggaaaugagggagcucauccag

SEQ ID NO: 75105 - RNA, 23 nt, Artificial Sequence
  Chemically synthesized
uuggaaaugagggagcucaucca

SEQ ID NO: 75106 - RNA, 23 nt, Artificial Sequence
  Chemically synthesized
cuuggaaaugagggagcucaucc

SEQ ID NO: 75107 - RNA, 23 nt, Artificial Sequence
  Chemically synthesized
ccuuggaaaugagggagcucauc

SEQ ID NO: 75108 - RNA, 23 nt, Artificial Sequence
  Chemically synthesized
accuuggaaaugagggagcucau

SEQ ID NO: 75109 - RNA, 23 nt, Artificial Sequence
  Chemically synthesized
acauugccuugcauuuguaccuu

SEQ ID NO: 75110 - RNA, 23 nt, Artificial Sequence
  Chemically synthesized
aacauugccuugcauuuguaccu

SEQ ID NO: 75111 - RNA, 23 nt, Artificial Sequence
  Chemically synthesized
caacauugccuugcauuuguacc

SEQ ID NO: 75112 - RNA, 23 nt, Artificial Sequence
  Chemically synthesized
caggauauugggaguguguggca

SEQ ID NO: 75113 - RNA, 23 nt, Artificial Sequence
  Chemically synthesized
gucugagagaccaucuccuaucu

SEQ ID NO: 75114 - RNA, 23 nt, Artificial Sequence
  Chemically synthesized
ugucugagagaccaucuccuauc

SEQ ID NO: 75115 - RNA, 23 nt, Artificial Sequence
  Chemically synthesized
augucugagagaccaucuccuau

SEQ ID NO: 75116 - RNA, 23 nt, Artificial Sequence
  Chemically synthesized
uccugagaaacguccaucucucu

SEQ ID NO: 75117 - RNA, 23 nt, Artificial Sequence
  Chemically synthesized
uuccugagaaacguccaucucuc

SEQ ID NO: 75118 - RNA, 23 nt, Artificial Sequence
  Chemically synthesized
cuuccugagaaacguccaucucu

SEQ ID NO: 75119 - RNA, 23 nt, Artificial Sequence
  Chemically synthesized
ccuuccugagaaacguccaucuc

SEQ ID NO: 75120 - RNA, 23 nt, Artificial Sequence
  Chemically synthesized
uccuuccugagaaacguccaucu

SEQ ID NO: 75121 - RNA, 23 nt, Artificial Sequence
  Chemically synthesized
cuuacuauucccacuuucauuca

SEQ ID NO: 75122 - RNA, 23 nt, Artificial Sequence
  Chemically synthesized
uguggcuuuuauuucagugccau

SEQ ID NO: 75123 - RNA, 23 nt, Artificial Sequence
  Chemically synthesized
gagaaacguccaucucucucccu

SEQ ID NO: 75124 - RNA, 23 nt, Artificial Sequence
  Chemically synthesized
ugagaaacguccaucucucuccc

SEQ ID NO: 75125 - RNA, 23 nt, Artificial Sequence
  Chemically synthesized
cugagaaacguccaucucucucc

SEQ ID NO: 75126 - RNA, 23 nt, Artificial Sequence
  Chemically synthesized
ccugagaaacguccaucucucuc

SEQ ID NO: 75127 - RNA, 23 nt, Artificial Sequence
  Chemically synthesized
agacauaucaugugugagauaac

SEQ ID NO: 75128 - RNA, 23 nt, Artificial Sequence
  Chemically synthesized
aagacauaucaugugugagauaa

SEQ ID NO: 75129 - RNA, 23 nt, Artificial Sequence
  Chemically synthesized
acugguguugagcaaugugcacu

SEQ ID NO: 75130 - RNA, 23 nt, Artificial Sequence
  Chemically synthesized
cacugguguugagcaaugugcac

SEQ ID NO: 75131 - RNA, 23 nt, Artificial Sequence
  Chemically synthesized
gcacugguguugagcaaugugca

SEQ ID NO: 75132 - RNA, 23 nt, Artificial Sequence
  Chemically synthesized
aagaaggcaagccaaccuuagcu

SEQ ID NO: 75133 - RNA, 23 nt, Artificial Sequence
  Chemically synthesized
gaagaaggcaagccaaccuuagc

SEQ ID NO: 75134 - RNA, 23 nt, Artificial Sequence
  Chemically synthesized
ggaagaaggcaagccaaccuuag

SEQ ID NO: 75135 - RNA, 23 nt, Artificial Sequence
  Chemically synthesized
gggaagaaggcaagccaaccuua

SEQ ID NO: 75136 - RNA, 23 nt, Artificial Sequence
  Chemically synthesized
guguggaugggaaacugcuccag

SEQ ID NO: 75137 - RNA, 23 nt, Artificial Sequence
  Chemically synthesized
gguguggaugggaaacugcucca

SEQ ID NO: 75138 - RNA, 23 nt, Artificial Sequence
  Chemically synthesized
caucauguaccaagugcuuggca

SEQ ID NO: 75139 - RNA, 23 nt, Artificial Sequence
  Chemically synthesized
gcuuucucuuucaguauuaaacu

SEQ ID NO: 75140 - RNA, 23 nt, Artificial Sequence
  Chemically synthesized
agauggaaagaaccacgcaggau

SEQ ID NO: 75141 - RNA, 23 nt, Artificial Sequence
  Chemically synthesized
aagauggaaagaaccacgcagga

SEQ ID NO: 75142 - RNA, 23 nt, Artificial Sequence
  Chemically synthesized
caagauggaaagaaccacgcagg

SEQ ID NO: 75143 - RNA, 23 nt, Artificial Sequence
  Chemically synthesized
acaagauggaaagaaccacgcag

SEQ ID NO: 75144 - RNA, 23 nt, Artificial Sequence
  Chemically synthesized
aacaagauggaaagaaccacgca

SEQ ID NO: 75145 - RNA, 23 nt, Artificial Sequence
  Chemically synthesized
uuguuugggugguuugugagccu

SEQ ID NO: 75146 - RNA, 23 nt, Artificial Sequence
  Chemically synthesized
uuuguuugggugguuugugagcc

SEQ ID NO: 75147 - RNA, 23 nt, Artificial Sequence
  Chemically synthesized
auuuguuugggugguuugugagc

SEQ ID NO: 75148 - RNA, 23 nt, Artificial Sequence
  Chemically synthesized
uauuuguuugggugguuugugag

SEQ ID NO: 75149 - RNA, 23 nt, Artificial Sequence
  Chemically synthesized
agaaacugcagaauuuugcacag

SEQ ID NO: 75150 - RNA, 23 nt, Artificial Sequence
  Chemically synthesized
gagaaacugcagaauuuugcaca

SEQ ID NO: 75151 - RNA, 23 nt, Artificial Sequence
  Chemically synthesized
uguguggcaugcauccucaucau

SEQ ID NO: 75152 - RNA, 23 nt, Artificial Sequence
  Chemically synthesized
guguguggcaugcauccucauca

SEQ ID NO: 75153 - RNA, 23 nt, Artificial Sequence
  Chemically synthesized
aguguguggcaugcauccucauc

SEQ ID NO: 75154 - RNA, 23 nt, Artificial Sequence
  Chemically synthesized
gaguguguggcaugcauccucau

SEQ ID NO: 75155 - RNA, 23 nt, Artificial Sequence
  Chemically synthesized
ggaguguguggcaugcauccuca

SEQ ID NO: 75156 - RNA, 23 nt, Artificial Sequence
  Chemically synthesized
cauuuuuagcuccuugaagacau

SEQ ID NO: 75157 - RNA, 23 nt, Artificial Sequence
  Chemically synthesized
uggagaugagacugaucgugggg

SEQ ID NO: 75158 - RNA, 23 nt, Artificial Sequence
  Chemically synthesized
guggagaugagacugaucguggg

SEQ ID NO: 75159 - RNA, 23 nt, Artificial Sequence
  Chemically synthesized
cguggagaugagacugaucgugg

SEQ ID NO: 75160 - RNA, 23 nt, Artificial Sequence
  Chemically synthesized
uuaugcuccuggcacagaauucc

SEQ ID NO: 75161 - RNA, 23 nt, Artificial Sequence
  Chemically synthesized
guuaugcuccuggcacagaauuc

SEQ ID NO: 75162 - RNA, 23 nt, Artificial Sequence
  Chemically synthesized
gguuaugcuccuggcacagaauu

SEQ ID NO: 75163 - RNA, 23 nt, Artificial Sequence
  Chemically synthesized
ugguuggaccuauugccaggaau

SEQ ID NO: 75164 - RNA, 23 nt, Artificial Sequence
  Chemically synthesized
caucucucucccuuacuauuccc

SEQ ID NO: 75165 - RNA, 23 nt, Artificial Sequence
  Chemically synthesized
auguggcuuuuauuucagugcca

SEQ ID NO: 75166 - RNA, 23 nt, Artificial Sequence
  Chemically synthesized
ccaggccagcuccuuuucuguga

SEQ ID NO: 75167 - RNA, 23 nt, Artificial Sequence
  Chemically synthesized
acaucuucuggagaaggacauca

SEQ ID NO: 75168 - RNA, 23 nt, Artificial Sequence
  Chemically synthesized
aacaucuucuggagaaggacauc

SEQ ID NO: 75169 - RNA, 23 nt, Artificial Sequence
  Chemically synthesized
gaacaucuucuggagaaggacau

SEQ ID NO: 75170 - RNA, 23 nt, Artificial Sequence
  Chemically synthesized
agaacaucuucuggagaaggaca

SEQ ID NO: 75171 - RNA, 23 nt, Artificial Sequence
  Chemically synthesized
acauaguauggaaguauuugaga

SEQ ID NO: 75172 - RNA, 23 nt, Artificial Sequence
  Chemically synthesized
ucagugccauacauguuauuguu

SEQ ID NO: 75173 - RNA, 23 nt, Artificial Sequence
  Chemically synthesized
uucagugccauacauguuauugu

SEQ ID NO: 75174 - RNA, 23 nt, Artificial Sequence
  Chemically synthesized
uuucagugccauacauguuauug

SEQ ID NO: 75175 - RNA, 23 nt, Artificial Sequence
  Chemically synthesized
auuucagugccauacauguuauu

SEQ ID NO: 75176 - RNA, 23 nt, Artificial Sequence
  Chemically synthesized
guaaaugagggcagaaaccuugu

SEQ ID NO: 75177 - RNA, 23 nt, Artificial Sequence
  Chemically synthesized
uguaaaugagggcagaaaccuug

SEQ ID NO: 75178 - RNA, 23 nt, Artificial Sequence
  Chemically synthesized
acuuguuuccugugcccaucauc

SEQ ID NO: 75179 - RNA, 23 nt, Artificial Sequence
  Chemically synthesized
gacuuguuuccugugcccaucau

SEQ ID NO: 75180 - RNA, 23 nt, Artificial Sequence
  Chemically synthesized
agacuuguuuccugugcccauca

SEQ ID NO: 75181 - RNA, 23 nt, Artificial Sequence
  Chemically synthesized
cagacuuguuuccugugcccauc

SEQ ID NO: 75182 - RNA, 23 nt, Artificial Sequence
  Chemically synthesized
ccagacuuguuuccugugcccau

SEQ ID NO: 75183 - RNA, 23 nt, Artificial Sequence
  Chemically synthesized
cuuccuucacaucucccaugguc

SEQ ID NO: 75184 - RNA, 23 nt, Artificial Sequence
  Chemically synthesized
acuuccuucacaucucccauggu

SEQ ID NO: 75185 - RNA, 23 nt, Artificial Sequence
  Chemically synthesized
aacuuccuucacaucucccaugg

SEQ ID NO: 75186 - RNA, 23 nt, Artificial Sequence
  Chemically synthesized
uaacuuccuucacaucucccaug

SEQ ID NO: 75187 - RNA, 23 nt, Artificial Sequence
  Chemically synthesized
auaacuuccuucacaucucccau

SEQ ID NO: 75188 - RNA, 23 nt, Artificial Sequence
  Chemically synthesized
aagccaaccuuagcuacaauccu

SEQ ID NO: 75189 - RNA, 23 nt, Artificial Sequence
  Chemically synthesized
gauuucuugcuaagcuccagccc

SEQ ID NO: 75190 - RNA, 23 nt, Artificial Sequence
  Chemically synthesized
ugauuucuugcuaagcuccagcc

SEQ ID NO: 75191 - RNA, 23 nt, Artificial Sequence
  Chemically synthesized
cacggauuauuauuuguacuuug

SEQ ID NO: 75192 - RNA, 23 nt, Artificial Sequence
  Chemically synthesized
acacggauuauuauuuguacuuu

SEQ ID NO: 75193 - RNA, 23 nt, Artificial Sequence
  Chemically synthesized
uacacggauuauuauuuguacuu

SEQ ID NO: 75194 - RNA, 23 nt, Artificial Sequence
  Chemically synthesized
auacacggauuauuauuuguacu

SEQ ID NO: 75195 - RNA, 23 nt, Artificial Sequence
  Chemically synthesized
uauacacggauuauuauuuguac

SEQ ID NO: 75196 - RNA, 23 nt, Artificial Sequence
  Chemically synthesized
gcuccaagagguuuuucagcucu

SEQ ID NO: 75197 - RNA, 23 nt, Artificial Sequence
  Chemically synthesized
agcuccaagagguuuuucagcuc

SEQ ID NO: 75198 - RNA, 23 nt, Artificial Sequence
  Chemically synthesized
cagcuccaagagguuuuucagcu

SEQ ID NO: 75199 - RNA, 23 nt, Artificial Sequence
  Chemically synthesized
gaugugggaaucucccagacuug

SEQ ID NO: 75200 - RNA, 23 nt, Artificial Sequence
  Chemically synthesized
ggaugugggaaucucccagacuu

SEQ ID NO: 75201 - RNA, 23 nt, Artificial Sequence
  Chemically synthesized
gggaugugggaaucucccagacu

SEQ ID NO: 75202 - RNA, 23 nt, Artificial Sequence
  Chemically synthesized
agggaugugggaaucucccagac

SEQ ID NO: 75203 - RNA, 23 nt, Artificial Sequence
  Chemically synthesized
cagggaugugggaaucucccaga

SEQ ID NO: 75204 - RNA, 23 nt, Artificial Sequence
  Chemically synthesized
uggcacagaauuccaccggugca

SEQ ID NO: 75205 - RNA, 23 nt, Artificial Sequence
  Chemically synthesized
uucugagcgggcuugugauaugc

SEQ ID NO: 75206 - RNA, 23 nt, Artificial Sequence
  Chemically synthesized
uuucugagcgggcuugugauaug

SEQ ID NO: 75207 - RNA, 23 nt, Artificial Sequence
  Chemically synthesized
uuuucugagcgggcuugugauau

SEQ ID NO: 75208 - RNA, 23 nt, Artificial Sequence
  Chemically synthesized
guuuucugagcgggcuugugaua

SEQ ID NO: 75209 - RNA, 23 nt, Artificial Sequence
  Chemically synthesized
uguuuucugagcgggcuugugau

SEQ ID NO: 75210 - RNA, 23 nt, Artificial Sequence
  Chemically synthesized
guguggcaugcauccucaucauc

SEQ ID NO: 75211 - RNA, 23 nt, Artificial Sequence
  Chemically synthesized
ucauccacgccaaguggaagcca

SEQ ID NO: 75212 - RNA, 23 nt, Artificial Sequence
  Chemically synthesized
aucauccacgccaaguggaagcc

SEQ ID NO: 75213 - RNA, 23 nt, Artificial Sequence
  Chemically synthesized
caucauccacgccaaguggaagc

SEQ ID NO: 75214 - RNA, 23 nt, Artificial Sequence
  Chemically synthesized
ccaucauccacgccaaguggaag

SEQ ID NO: 75215 - RNA, 23 nt, Artificial Sequence
  Chemically synthesized
cccaucauccacgccaaguggaa

SEQ ID NO: 75216 - RNA, 23 nt, Artificial Sequence
  Chemically synthesized
caaagaucuuucguugguuguuu

SEQ ID NO: 75217 - RNA, 23 nt, Artificial Sequence
  Chemically synthesized
ucaaagaucuuucguugguuguu

SEQ ID NO: 75218 - RNA, 23 nt, Artificial Sequence
  Chemically synthesized
cucaaagaucuuucguugguugu

SEQ ID NO: 75219 - RNA, 23 nt, Artificial Sequence
  Chemically synthesized
ucucaaagaucuuucguugguug

SEQ ID NO: 75220 - RNA, 23 nt, Artificial Sequence
  Chemically synthesized
gucucaaagaucuuucguugguu

SEQ ID NO: 75221 - RNA, 23 nt, Artificial Sequence
  Chemically synthesized
agaugagacugaucgugggguug

SEQ ID NO: 75222 - RNA, 23 nt, Artificial Sequence
  Chemically synthesized
gagaugagacugaucgugggguu

SEQ ID NO: 75223 - RNA, 23 nt, Artificial Sequence
  Chemically synthesized
ggagaugagacugaucguggggu

SEQ ID NO: 75224 - RNA, 23 nt, Artificial Sequence
  Chemically synthesized
agagaaggccaggaagaauggug

SEQ ID NO: 75225 - RNA, 23 nt, Artificial Sequence
  Chemically synthesized
gaugucugagagaccaucuccua

SEQ ID NO: 75226 - RNA, 23 nt, Artificial Sequence
  Chemically synthesized
acgcgcucagacaugauaugcgg

SEQ ID NO: 75227 - RNA, 23 nt, Artificial Sequence
  Chemically synthesized
cacgcgcucagacaugauaugcg

SEQ ID NO: 75228 - RNA, 23 nt, Artificial Sequence
  Chemically synthesized
ccacgcgcucagacaugauaugc

SEQ ID NO: 75229 - RNA, 23 nt, Artificial Sequence
  Chemically synthesized
cccacgcgcucagacaugauaug

SEQ ID NO: 75230 - RNA, 23 nt, Artificial Sequence
  Chemically synthesized
gcccacgcgcucagacaugauau

SEQ ID NO: 75231 - RNA, 23 nt, Artificial Sequence
  Chemically synthesized
caguuucagccagaauguggaac

SEQ ID NO: 75232 - RNA, 23 nt, Artificial Sequence
  Chemically synthesized
ggauauugggaguguguggcaug

SEQ ID NO: 75233 - RNA, 23 nt, Artificial Sequence
  Chemically synthesized
aggauauugggaguguguggcau

SEQ ID NO: 75234 - RNA, 23 nt, Artificial Sequence
  Chemically synthesized
uuccuuccugagaaacguccauc

SEQ ID NO: 75235 - RNA, 23 nt, Artificial Sequence
  Chemically synthesized
uuuccuuccugagaaacguccau

SEQ ID NO: 75236 - RNA, 23 nt, Artificial Sequence
  Chemically synthesized
ucugagcgggcuugugauaugca

SEQ ID NO: 75237 - RNA, 23 nt, Artificial Sequence
  Chemically synthesized
auuaucuuuuggcucugaagaag

SEQ ID NO: 75238 - RNA, 23 nt, Artificial Sequence
  Chemically synthesized
cuuuguuacugaaaugagccucg

SEQ ID NO: 75239 - RNA, 23 nt, Artificial Sequence
  Chemically synthesized
ucccuucuuuaccuucauuucau

SEQ ID NO: 75240 - RNA, 23 nt, Artificial Sequence
  Chemically synthesized
aaccuuuaucccugcuuaucuga

SEQ ID NO: 75241 - RNA, 23 nt, Artificial Sequence
  Chemically synthesized
gaaacuucccaacuucccuguuc

SEQ ID NO: 75242 - RNA, 23 nt, Artificial Sequence
  Chemically synthesized
ugaaacuucccaacuucccuguu

SEQ ID NO: 75243 - RNA, 23 nt, Artificial Sequence
  Chemically synthesized
cugaaacuucccaacuucccugu

SEQ ID NO: 75244 - RNA, 23 nt, Artificial Sequence
  Chemically synthesized
ucugaaacuucccaacuucccug

SEQ ID NO: 75245 - RNA, 23 nt, Artificial Sequence
  Chemically synthesized
cauguaccaagugcuuggcacau

SEQ ID NO: 75246 - RNA, 23 nt, Artificial Sequence
  Chemically synthesized
ucauguaccaagugcuuggcaca

SEQ ID NO: 75247 - RNA, 23 nt, Artificial Sequence
  Chemically synthesized
cuauucccacuuucauucaauca

SEQ ID NO: 75248 - RNA, 23 nt, Artificial Sequence
  Chemically synthesized
acuauucccacuuucauucaauc

SEQ ID NO: 75249 - RNA, 23 nt, Artificial Sequence
  Chemically synthesized
uacuauucccacuuucauucaau

SEQ ID NO: 75250 - RNA, 23 nt, Artificial Sequence
  Chemically synthesized
uuacuauucccacuuucauucaa

SEQ ID NO: 75251 - RNA, 23 nt, Artificial Sequence
  Chemically synthesized
ggaaagaaccacgcaggaucccc

SEQ ID NO: 75252 - RNA, 23 nt, Artificial Sequence
  Chemically synthesized
uggaaagaaccacgcaggauccc

SEQ ID NO: 75253 - RNA, 23 nt, Artificial Sequence
  Chemically synthesized
auggaaagaaccacgcaggaucc

SEQ ID NO: 75254 - RNA, 23 nt, Artificial Sequence
  Chemically synthesized
gauggaaagaaccacgcaggauc

SEQ ID NO: 75255 - RNA, 23 nt, Artificial Sequence
  Chemically synthesized
cgggaagguuaugcuccuggcac

SEQ ID NO: 75256 - RNA, 23 nt, Artificial Sequence
  Chemically synthesized
ucgggaagguuaugcuccuggca

SEQ ID NO: 75257 - RNA, 23 nt, Artificial Sequence
  Chemically synthesized
guguucaguuccagcuuuuguag

SEQ ID NO: 75258 - RNA, 23 nt, Artificial Sequence
  Chemically synthesized
uguguucaguuccagcuuuugua

SEQ ID NO: 75259 - RNA, 23 nt, Artificial Sequence
  Chemically synthesized
uuguguucaguuccagcuuuugu

SEQ ID NO: 75260 - RNA, 23 nt, Artificial Sequence
  Chemically synthesized
uuuguguucaguuccagcuuuug

SEQ ID NO: 75261 - RNA, 23 nt, Artificial Sequence
  Chemically synthesized
auuuguguucaguuccagcuuuu

SEQ ID NO: 75262 - RNA, 23 nt, Artificial Sequence
  Chemically synthesized
uuauugaucuuugcccauggaag

SEQ ID NO: 75263 - RNA, 23 nt, Artificial Sequence
  Chemically synthesized
auuugagagagagaaccuuucca

SEQ ID NO: 75264 - RNA, 23 nt, Artificial Sequence
  Chemically synthesized
gacaauauacacggauuauuauu

SEQ ID NO: 75265 - RNA, 23 nt, Artificial Sequence
  Chemically synthesized
ccaugcggaacaccaaacgaggu

SEQ ID NO: 75266 - RNA, 23 nt, Artificial Sequence
  Chemically synthesized
gccaugcggaacaccaaacgagg

SEQ ID NO: 75267 - RNA, 23 nt, Artificial Sequence
  Chemically synthesized
cgccaugcggaacaccaaacgag

SEQ ID NO: 75268 - RNA, 23 nt, Artificial Sequence
  Chemically synthesized
ccgccaugcggaacaccaaacga

SEQ ID NO: 75269 - RNA, 23 nt, Artificial Sequence
  Chemically synthesized
uguuucagcugcaguugaagagc

SEQ ID NO: 75270 - RNA, 23 nt, Artificial Sequence
  Chemically synthesized
auguuucagcugcaguugaagag

SEQ ID NO: 75271 - RNA, 23 nt, Artificial Sequence
  Chemically synthesized
aauguuucagcugcaguugaaga

SEQ ID NO: 75272 - RNA, 23 nt, Artificial Sequence
  Chemically synthesized
ggaaucucccagacuuguuuccu

SEQ ID NO: 75273 - RNA, 23 nt, Artificial Sequence
  Chemically synthesized
gggaaucucccagacuuguuucc

SEQ ID NO: 75274 - RNA, 23 nt, Artificial Sequence
  Chemically synthesized
ugggaaucucccagacuuguuuc

SEQ ID NO: 75275 - RNA, 23 nt, Artificial Sequence
  Chemically synthesized
gugggaaucucccagacuuguuu

SEQ ID NO: 75276 - RNA, 23 nt, Artificial Sequence
  Chemically synthesized
ugugggaaucucccagacuuguu

SEQ ID NO: 75277 - RNA, 23 nt, Artificial Sequence
  Chemically synthesized
aaaaguugccgaagaugagacug

SEQ ID NO: 75278 - RNA, 23 nt, Artificial Sequence
  Chemically synthesized
ugcccacgcgcucagacaugaua

SEQ ID NO: 75279 - RNA, 23 nt, Artificial Sequence
  Chemically synthesized
uuauccacuggcauuuuuagcuc

SEQ ID NO: 75280 - RNA, 23 nt, Artificial Sequence
  Chemically synthesized
uuuauccacuggcauuuuuagcu

SEQ ID NO: 75281 - RNA, 23 nt, Artificial Sequence
  Chemically synthesized
uuuuauccacuggcauuuuuagc

SEQ ID NO: 75282 - RNA, 23 nt, Artificial Sequence
  Chemically synthesized
uauuucagugccauacauguuau

SEQ ID NO: 75283 - RNA, 23 nt, Artificial Sequence
  Chemically synthesized
cuucuuuaccuucauuucauccu

SEQ ID NO: 75284 - RNA, 23 nt, Artificial Sequence
  Chemically synthesized
ccuucuuuaccuucauuucaucc

SEQ ID NO: 75285 - RNA, 23 nt, Artificial Sequence
  Chemically synthesized
cccuucuuuaccuucauuucauc

SEQ ID NO: 75286 - RNA, 23 nt, Artificial Sequence
  Chemically synthesized
aaaugagggagcucauccaggcc

SEQ ID NO: 75287 - RNA, 23 nt, Artificial Sequence
  Chemically synthesized
gaaaugagggagcucauccaggc

SEQ ID NO: 75288 - RNA, 23 nt, Artificial Sequence
  Chemically synthesized
ggaaaugagggagcucauccagg

SEQ ID NO: 75289 - RNA, 23 nt, Artificial Sequence
  Chemically synthesized
cuggaccacaggaggugugauag

SEQ ID NO: 75290 - RNA, 23 nt, Artificial Sequence
  Chemically synthesized
acuggaccacaggaggugugaua

SEQ ID NO: 75291 - RNA, 23 nt, Artificial Sequence
  Chemically synthesized
accuuuaucccugcuuaucugaa

SEQ ID NO: 75292 - RNA, 23 nt, Artificial Sequence
  Chemically synthesized
cugugcccaucaucucugccuuu

SEQ ID NO: 75293 - RNA, 23 nt, Artificial Sequence
  Chemically synthesized
agacaugauaugcggcuaugccu

SEQ ID NO: 75294 - RNA, 23 nt, Artificial Sequence
  Chemically synthesized
uuuuuguccuagagugagaguuu

SEQ ID NO: 75295 - RNA, 23 nt, Artificial Sequence
  Chemically synthesized
cuuuuuguccuagagugagaguu

SEQ ID NO: 75296 - RNA, 23 nt, Artificial Sequence
  Chemically synthesized
uuuuccuuccugagaaacgucca

SEQ ID NO: 75297 - RNA, 23 nt, Artificial Sequence
  Chemically synthesized
gccugugcguucccuucaguacu

SEQ ID NO: 75298 - RNA, 23 nt, Artificial Sequence
  Chemically synthesized
ggccugugcguucccuucaguac

SEQ ID NO: 75299 - RNA, 23 nt, Artificial Sequence
  Chemically synthesized
cggccugugcguucccuucagua

SEQ ID NO: 75300 - RNA, 23 nt, Artificial Sequence
  Chemically synthesized
uguucaguuccagcuuuuguaga

SEQ ID NO: 75301 - RNA, 23 nt, Artificial Sequence
  Chemically synthesized
ccuucacaucucccauggucccu

SEQ ID NO: 75302 - RNA, 23 nt, Artificial Sequence
  Chemically synthesized
uccuucacaucucccaugguccc

SEQ ID NO: 75303 - RNA, 23 nt, Artificial Sequence
  Chemically synthesized
uuccuucacaucucccauggucc

SEQ ID NO: 75304 - RNA, 23 nt, Artificial Sequence
  Chemically synthesized
aauaucaaaggagaguuuaauac

SEQ ID NO: 75305 - RNA, 23 nt, Artificial Sequence
  Chemically synthesized
auaucaaaggagaguuuaauacu

SEQ ID NO: 75306 - RNA, 23 nt, Artificial Sequence
  Chemically synthesized
uaucaaaggagaguuuaauacug

SEQ ID NO: 75307 - RNA, 23 nt, Artificial Sequence
  Chemically synthesized
aagguaaagaagggagagauaug

SEQ ID NO: 75308 - RNA, 23 nt, Artificial Sequence
  Chemically synthesized
agguaaagaagggagagauauga

SEQ ID NO: 75309 - RNA, 23 nt, Artificial Sequence
  Chemically synthesized
gguaaagaagggagagauaugaa

SEQ ID NO: 75310 - RNA, 23 nt, Artificial Sequence
  Chemically synthesized
guaaagaagggagagauaugaag

SEQ ID NO: 75311 - RNA, 23 nt, Artificial Sequence
  Chemically synthesized
uaaagaagggagagauaugaagc

SEQ ID NO: 75312 - RNA, 23 nt, Artificial Sequence
  Chemically synthesized
uuucuuuaccggcaucacucucc

SEQ ID NO: 75313 - RNA, 23 nt, Artificial Sequence
  Chemically synthesized
uucuuuaccggcaucacucuccu

SEQ ID NO: 75314 - RNA, 23 nt, Artificial Sequence
  Chemically synthesized
ucuuuaccggcaucacucuccuc

SEQ ID NO: 75315 - RNA, 23 nt, Artificial Sequence
  Chemically synthesized
cuuuaccggcaucacucuccucg

SEQ ID NO: 75316 - RNA, 23 nt, Artificial Sequence
  Chemically synthesized
uuuaccggcaucacucuccucgc

SEQ ID NO: 75317 - RNA, 23 nt, Artificial Sequence
  Chemically synthesized
agagauaugaagcagggagauaa

SEQ ID NO: 75318 - RNA, 23 nt, Artificial Sequence
  Chemically synthesized
gagauaugaagcagggagauaag

SEQ ID NO: 75319 - RNA, 23 nt, Artificial Sequence
  Chemically synthesized
agauaugaagcagggagauaagc

SEQ ID NO: 75320 - RNA, 23 nt, Artificial Sequence
  Chemically synthesized
gauaugaagcagggagauaagcu

SEQ ID NO: 75321 - RNA, 23 nt, Artificial Sequence
  Chemically synthesized
auaugaagcagggagauaagcua

SEQ ID NO: 75322 - RNA, 23 nt, Artificial Sequence
  Chemically synthesized
agggagagauaugaagcagggag

SEQ ID NO: 75323 - RNA, 23 nt, Artificial Sequence
  Chemically synthesized
gggagagauaugaagcagggaga

SEQ ID NO: 75324 - RNA, 23 nt, Artificial Sequence
  Chemically synthesized
ggagagauaugaagcagggagau

SEQ ID NO: 75325 - RNA, 23 nt, Artificial Sequence
  Chemically synthesized
gagagauaugaagcagggagaua

SEQ ID NO: 75326 - RNA, 23 nt, Artificial Sequence
  Chemically synthesized
aaagaagggagagauaugaagca

SEQ ID NO: 75327 - RNA, 23 nt, Artificial Sequence
  Chemically synthesized
uucucuugcauuuccugugcagu

SEQ ID NO: 75328 - RNA, 23 nt, Artificial Sequence
  Chemically synthesized
aagaagggagagauaugaagcag

SEQ ID NO: 75329 - RNA, 23 nt, Artificial Sequence
  Chemically synthesized
agaagggagagauaugaagcagg

SEQ ID NO: 75330 - RNA, 23 nt, Artificial Sequence
  Chemically synthesized
gaagggagagauaugaagcaggg

SEQ ID NO: 75331 - RNA, 23 nt, Artificial Sequence
  Chemically synthesized
uuccugugcagucuggucacaua

SEQ ID NO: 75332 - RNA, 23 nt, Artificial Sequence
  Chemically synthesized
auaugaagugcagguugauugaa

SEQ ID NO: 75333 - RNA, 23 nt, Artificial Sequence
  Chemically synthesized
uaugaagugcagguugauugaau

SEQ ID NO: 75334 - RNA, 23 nt, Artificial Sequence
  Chemically synthesized
augaagugcagguugauugaaug

SEQ ID NO: 75335 - RNA, 23 nt, Artificial Sequence
  Chemically synthesized
agucuuaaagaacagggaaguug

SEQ ID NO: 75336 - RNA, 23 nt, Artificial Sequence
  Chemically synthesized
gucuuaaagaacagggaaguugg

SEQ ID NO: 75337 - RNA, 23 nt, Artificial Sequence
  Chemically synthesized
ucuuaaagaacagggaaguuggg

SEQ ID NO: 75338 - RNA, 23 nt, Artificial Sequence
  Chemically synthesized
cuuaaagaacagggaaguuggga

SEQ ID NO: 75339 - RNA, 23 nt, Artificial Sequence
  Chemically synthesized
uuaaagaacagggaaguugggaa

SEQ ID NO: 75340 - RNA, 23 nt, Artificial Sequence
  Chemically synthesized
accauucuuccuggccuucucug

SEQ ID NO: 75341 - RNA, 23 nt, Artificial Sequence
  Chemically synthesized
ccauucuuccuggccuucucuga

SEQ ID NO: 75342 - RNA, 23 nt, Artificial Sequence
  Chemically synthesized
cauucuuccuggccuucucugau

SEQ ID NO: 75343 - RNA, 23 nt, Artificial Sequence
  Chemically synthesized
auucuuccuggccuucucugaug

SEQ ID NO: 75344 - RNA, 23 nt, Artificial Sequence
  Chemically synthesized
uucuuccuggccuucucugaugc

SEQ ID NO: 75345 - RNA, 23 nt, Artificial Sequence
  Chemically synthesized
caguauucagacaucuccuugca

SEQ ID NO: 75346 - RNA, 23 nt, Artificial Sequence
  Chemically synthesized
aguauucagacaucuccuugcac

SEQ ID NO: 75347 - RNA, 23 nt, Artificial Sequence
  Chemically synthesized
guauucagacaucuccuugcacc

SEQ ID NO: 75348 - RNA, 23 nt, Artificial Sequence
  Chemically synthesized
uauucagacaucuccuugcaccg

SEQ ID NO: 75349 - RNA, 23 nt, Artificial Sequence
  Chemically synthesized
auucagacaucuccuugcaccgg

SEQ ID NO: 75350 - RNA, 23 nt, Artificial Sequence
  Chemically synthesized
uucagacaucuccuugcaccggu

SEQ ID NO: 75351 - RNA, 23 nt, Artificial Sequence
  Chemically synthesized
ucagacaucuccuugcaccggug

SEQ ID NO: 75352 - RNA, 23 nt, Artificial Sequence
  Chemically synthesized
aagguuggcuugccuucuucccu

SEQ ID NO: 75353 - RNA, 23 nt, Artificial Sequence
  Chemically synthesized
agguuggcuugccuucuucccuc

SEQ ID NO: 75354 - RNA, 23 nt, Artificial Sequence
  Chemically synthesized
gguuggcuugccuucuucccucu

SEQ ID NO: 75355 - RNA, 23 nt, Artificial Sequence
  Chemically synthesized
guuggcuugccuucuucccucuu

SEQ ID NO: 75356 - RNA, 23 nt, Artificial Sequence
  Chemically synthesized
uuggcuugccuucuucccucuuu

SEQ ID NO: 75357 - RNA, 23 nt, Artificial Sequence
  Chemically synthesized
acacuugagcaagagccucgaug

SEQ ID NO: 75358 - RNA, 23 nt, Artificial Sequence
  Chemically synthesized
cacuugagcaagagccucgaugu

SEQ ID NO: 75359 - RNA, 23 nt, Artificial Sequence
  Chemically synthesized
acuugagcaagagccucgaugua

SEQ ID NO: 75360 - RNA, 23 nt, Artificial Sequence
  Chemically synthesized
cuugagcaagagccucgauguac

SEQ ID NO: 75361 - RNA, 23 nt, Artificial Sequence
  Chemically synthesized
uugagcaagagccucgauguacc

SEQ ID NO: 75362 - RNA, 23 nt, Artificial Sequence
  Chemically synthesized
guucuuucucuccagugaagugc

SEQ ID NO: 75363 - RNA, 23 nt, Artificial Sequence
  Chemically synthesized
uuuccaaggugaugauguccuuc

SEQ ID NO: 75364 - RNA, 23 nt, Artificial Sequence
  Chemically synthesized
aggauucuagacagauuuggugg

SEQ ID NO: 75365 - RNA, 23 nt, Artificial Sequence
  Chemically synthesized
auaguaagggagagagauggacg

SEQ ID NO: 75366 - RNA, 23 nt, Artificial Sequence
  Chemically synthesized
uaguaagggagagagauggacgu

SEQ ID NO: 75367 - RNA, 23 nt, Artificial Sequence
  Chemically synthesized
aguaagggagagagauggacguu

SEQ ID NO: 75368 - RNA, 23 nt, Artificial Sequence
  Chemically synthesized
guaagggagagagauggacguuu

SEQ ID NO: 75369 - RNA, 23 nt, Artificial Sequence
  Chemically synthesized
uaagggagagagauggacguuuc

SEQ ID NO: 75370 - RNA, 23 nt, Artificial Sequence
  Chemically synthesized
uaaagaacagggaaguugggaag

SEQ ID NO: 75371 - RNA, 23 nt, Artificial Sequence
  Chemically synthesized
aagggagagauaugaagcaggga

SEQ ID NO: 75372 - RNA, 23 nt, Artificial Sequence
  Chemically synthesized
gguuacagagucuagggaaacac

SEQ ID NO: 75373 - RNA, 23 nt, Artificial Sequence
  Chemically synthesized
guuacagagucuagggaaacaca

SEQ ID NO: 75374 - RNA, 23 nt, Artificial Sequence
  Chemically synthesized
uuacagagucuagggaaacacac

SEQ ID NO: 75375 - RNA, 23 nt, Artificial Sequence
  Chemically synthesized
ugaaaugaagguaaagaagggag

SEQ ID NO: 75376 - RNA, 23 nt, Artificial Sequence
  Chemically synthesized
gaaaugaagguaaagaagggaga

SEQ ID NO: 75377 - RNA, 23 nt, Artificial Sequence
  Chemically synthesized
aaaugaagguaaagaagggagag

SEQ ID NO: 75378 - RNA, 23 nt, Artificial Sequence
  Chemically synthesized
aaugaagguaaagaagggagaga

SEQ ID NO: 75379 - RNA, 23 nt, Artificial Sequence
  Chemically synthesized
augaagguaaagaagggagagau

SEQ ID NO: 75380 - RNA, 23 nt, Artificial Sequence
  Chemically synthesized
ggaauaguaagggagagagaugg

SEQ ID NO: 75381 - RNA, 23 nt, Artificial Sequence
  Chemically synthesized
gaauaguaagggagagagaugga

SEQ ID NO: 75382 - RNA, 23 nt, Artificial Sequence
  Chemically synthesized
aauaguaagggagagagauggac

SEQ ID NO: 75383 - RNA, 23 nt, Artificial Sequence
  Chemically synthesized
agaucuuugagacuuccaugggc

SEQ ID NO: 75384 - RNA, 23 nt, Artificial Sequence
  Chemically synthesized
ggggaauuuauaugcccucuccc

SEQ ID NO: 75385 - RNA, 23 nt, Artificial Sequence
  Chemically synthesized
gggaauuuauaugcccucucccc

SEQ ID NO: 75386 - RNA, 23 nt, Artificial Sequence
  Chemically synthesized
ggaauuuauaugcccucucccca

SEQ ID NO: 75387 - RNA, 23 nt, Artificial Sequence
  Chemically synthesized
gaauuuauaugcccucuccccau

SEQ ID NO: 75388 - RNA, 23 nt, Artificial Sequence
  Chemically synthesized
aauuuauaugcccucuccccaua

SEQ ID NO: 75389 - RNA, 23 nt, Artificial Sequence
  Chemically synthesized
caccuuccaaacucucacucuag

SEQ ID NO: 75390 - RNA, 23 nt, Artificial Sequence
  Chemically synthesized
accuuccaaacucucacucuagg

SEQ ID NO: 75391 - RNA, 23 nt, Artificial Sequence
  Chemically synthesized
ccuuccaaacucucacucuagga

SEQ ID NO: 75392 - RNA, 23 nt, Artificial Sequence
  Chemically synthesized
cuuccaaacucucacucuaggac

SEQ ID NO: 75393 - RNA, 23 nt, Artificial Sequence
  Chemically synthesized
uuccaaacucucacucuaggaca

SEQ ID NO: 75394 - RNA, 23 nt, Artificial Sequence
  Chemically synthesized
cagcuguuuggcuagcaccacuc

SEQ ID NO: 75395 - RNA, 23 nt, Artificial Sequence
  Chemically synthesized
agcuguuuggcuagcaccacucg

SEQ ID NO: 75396 - RNA, 23 nt, Artificial Sequence
  Chemically synthesized
gcuguuuggcuagcaccacucgg

SEQ ID NO: 75397 - RNA, 23 nt, Artificial Sequence
  Chemically synthesized
cuguuuggcuagcaccacucggu

SEQ ID NO: 75398 - RNA, 23 nt, Artificial Sequence
  Chemically synthesized
uguuuggcuagcaccacucgguu

SEQ ID NO: 75399 - RNA, 23 nt, Artificial Sequence
  Chemically synthesized
gccacauaauaucaaaggagagu

SEQ ID NO: 75400 - RNA, 23 nt, Artificial Sequence
  Chemically synthesized
ccacauaauaucaaaggagaguu

SEQ ID NO: 75401 - RNA, 23 nt, Artificial Sequence
  Chemically synthesized
cacauaauaucaaaggagaguuu

SEQ ID NO: 75402 - RNA, 23 nt, Artificial Sequence
  Chemically synthesized
acauaauaucaaaggagaguuua

SEQ ID NO: 75403 - RNA, 23 nt, Artificial Sequence
  Chemically synthesized
cauaauaucaaaggagaguuuaa

SEQ ID NO: 75404 - RNA, 23 nt, Artificial Sequence
  Chemically synthesized
uuucucaggaaggaaaaagacag

SEQ ID NO: 75405 - RNA, 23 nt, Artificial Sequence
  Chemically synthesized
uucucaggaaggaaaaagacaga

SEQ ID NO: 75406 - RNA, 23 nt, Artificial Sequence
  Chemically synthesized
ucucaggaaggaaaaagacagag

SEQ ID NO: 75407 - RNA, 23 nt, Artificial Sequence
  Chemically synthesized
cucaggaaggaaaaagacagaga

SEQ ID NO: 75408 - RNA, 23 nt, Artificial Sequence
  Chemically synthesized
ucaggaaggaaaaagacagagag

SEQ ID NO: 75409 - RNA, 23 nt, Artificial Sequence
  Chemically synthesized
agggaaacacaccauucuuccug

SEQ ID NO: 75410 - RNA, 23 nt, Artificial Sequence
  Chemically synthesized
gggaaacacaccauucuuccugg

SEQ ID NO: 75411 - RNA, 23 nt, Artificial Sequence
  Chemically synthesized
ggaaacacaccauucuuccuggc

SEQ ID NO: 75412 - RNA, 23 nt, Artificial Sequence
  Chemically synthesized
gaaacacaccauucuuccuggcc

SEQ ID NO: 75413 - RNA, 23 nt, Artificial Sequence
  Chemically synthesized
aaacacaccauucuuccuggccu

SEQ ID NO: 75414 - RNA, 23 nt, Artificial Sequence
  Chemically synthesized
uggcuugccuucuucccucuuuu

SEQ ID NO: 75415 - RNA, 23 nt, Artificial Sequence
  Chemically synthesized
ggcuugccuucuucccucuuuua

SEQ ID NO: 75416 - RNA, 23 nt, Artificial Sequence
  Chemically synthesized
gcuugccuucuucccucuuuuau

SEQ ID NO: 75417 - RNA, 23 nt, Artificial Sequence
  Chemically synthesized
cuugccuucuucccucuuuuauu

SEQ ID NO: 75418 - RNA, 23 nt, Artificial Sequence
  Chemically synthesized
ucuuccuggccuucucugaugcu

SEQ ID NO: 75419 - RNA, 23 nt, Artificial Sequence
  Chemically synthesized
cuuccuggccuucucugaugcuc

SEQ ID NO: 75420 - RNA, 23 nt, Artificial Sequence
  Chemically synthesized
uuccuggccuucucugaugcucc

SEQ ID NO: 75421 - RNA, 23 nt, Artificial Sequence
  Chemically synthesized
ucucuugcauuuccugugcaguc

SEQ ID NO: 75422 - RNA, 23 nt, Artificial Sequence
  Chemically synthesized
cucuugcauuuccugugcagucu

SEQ ID NO: 75423 - RNA, 23 nt, Artificial Sequence
  Chemically synthesized
ucuugcauuuccugugcagucug

SEQ ID NO: 75424 - RNA, 23 nt, Artificial Sequence
  Chemically synthesized
ugaagguaaagaagggagagaua

SEQ ID NO: 75425 - RNA, 23 nt, Artificial Sequence
  Chemically synthesized
gaagguaaagaagggagagauau

SEQ ID NO: 75426 - RNA, 23 nt, Artificial Sequence
  Chemically synthesized
gucucuagucauguuugcuucuu

SEQ ID NO: 75427 - RNA, 23 nt, Artificial Sequence
  Chemically synthesized
ucucuagucauguuugcuucuuc

SEQ ID NO: 75428 - RNA, 23 nt, Artificial Sequence
  Chemically synthesized
aaauuuggacaccuuccaaacuc

SEQ ID NO: 75429 - RNA, 23 nt, Artificial Sequence
  Chemically synthesized
aauuuggacaccuuccaaacucu

SEQ ID NO: 75430 - RNA, 23 nt, Artificial Sequence
  Chemically synthesized
auuuggacaccuuccaaacucuc

SEQ ID NO: 75431 - RNA, 23 nt, Artificial Sequence
  Chemically synthesized
uuuggacaccuuccaaacucuca

SEQ ID NO: 75432 - RNA, 23 nt, Artificial Sequence
  Chemically synthesized
uuggacaccuuccaaacucucac

SEQ ID NO: 75433 - RNA, 23 nt, Artificial Sequence
  Chemically synthesized
agucucaucuucggcaacuuuuc

SEQ ID NO: 75434 - RNA, 23 nt, Artificial Sequence
  Chemically synthesized
gucucaucuucggcaacuuuucu

SEQ ID NO: 75435 - RNA, 23 nt, Artificial Sequence
  Chemically synthesized
ucucaucuucggcaacuuuucuu

SEQ ID NO: 75436 - RNA, 23 nt, Artificial Sequence
  Chemically synthesized
cucaucuucggcaacuuuucuuu

SEQ ID NO: 75437 - RNA, 23 nt, Artificial Sequence
  Chemically synthesized
ucaucuucggcaacuuuucuuua

SEQ ID NO: 75438 - RNA, 23 nt, Artificial Sequence
  Chemically synthesized
aagcuugaagagggugacuagag

SEQ ID NO: 75439 - RNA, 23 nt, Artificial Sequence
  Chemically synthesized
agcuugaagagggugacuagagu

SEQ ID NO: 75440 - RNA, 23 nt, Artificial Sequence
  Chemically synthesized
gcuugaagagggugacuagagua

SEQ ID NO: 75441 - RNA, 23 nt, Artificial Sequence
  Chemically synthesized
uguauggcacugaaauaaaagcc

SEQ ID NO: 75442 - RNA, 23 nt, Artificial Sequence
  Chemically synthesized
guauggcacugaaauaaaagcca

SEQ ID NO: 75443 - RNA, 23 nt, Artificial Sequence
  Chemically synthesized
uauggcacugaaauaaaagccac

SEQ ID NO: 75444 - RNA, 23 nt, Artificial Sequence
  Chemically synthesized
uaugaagcagggagauaagcuag

SEQ ID NO: 75445 - RNA, 23 nt, Artificial Sequence
  Chemically synthesized
ccgcuucuggacacugcagcaag

SEQ ID NO: 75446 - RNA, 23 nt, Artificial Sequence
  Chemically synthesized
cgcuucuggacacugcagcaagg

SEQ ID NO: 75447 - RNA, 23 nt, Artificial Sequence
  Chemically synthesized
gcuucuggacacugcagcaaggu

SEQ ID NO: 75448 - RNA, 23 nt, Artificial Sequence
  Chemically synthesized
cuucuggacacugcagcaaggug

SEQ ID NO: 75449 - RNA, 23 nt, Artificial Sequence
  Chemically synthesized
uucuggacacugcagcaaggugc

SEQ ID NO: 75450 - RNA, 23 nt, Artificial Sequence
  Chemically synthesized
aaccuucccgauccuugauaagu

SEQ ID NO: 75451 - RNA, 23 nt, Artificial Sequence
  Chemically synthesized
ucccauccacaccauagauggcg

SEQ ID NO: 75452 - RNA, 23 nt, Artificial Sequence
  Chemically synthesized
cccauccacaccauagauggcgc

SEQ ID NO: 75453 - RNA, 23 nt, Artificial Sequence
  Chemically synthesized
ccauccacaccauagauggcgcc

SEQ ID NO: 75454 - RNA, 23 nt, Artificial Sequence
  Chemically synthesized
cauccacaccauagauggcgccc

SEQ ID NO: 75455 - RNA, 23 nt, Artificial Sequence
  Chemically synthesized
auccacaccauagauggcgcccu

SEQ ID NO: 75456 - RNA, 23 nt, Artificial Sequence
  Chemically synthesized
ucacuaaagugccaucuacaaaa

SEQ ID NO: 75457 - RNA, 23 nt, Artificial Sequence
  Chemically synthesized
ucucuccagugaagugcacauug

SEQ ID NO: 75458 - RNA, 23 nt, Artificial Sequence
  Chemically synthesized
cucuccagugaagugcacauugc

SEQ ID NO: 75459 - RNA, 23 nt, Artificial Sequence
  Chemically synthesized
ucuccagugaagugcacauugcu

SEQ ID NO: 75460 - RNA, 23 nt, Artificial Sequence
  Chemically synthesized
cuccagugaagugcacauugcuc

SEQ ID NO: 75461 - RNA, 23 nt, Artificial Sequence
  Chemically synthesized
uccagugaagugcacauugcuca

SEQ ID NO: 75462 - RNA, 23 nt, Artificial Sequence
  Chemically synthesized
ucgauguaccaggaaccucguuu

SEQ ID NO: 75463 - RNA, 23 nt, Artificial Sequence
  Chemically synthesized
augaagcagggagauaagcuagg

SEQ ID NO: 75464 - RNA, 23 nt, Artificial Sequence
  Chemically synthesized
acauuacaucuuugagcauuuac

SEQ ID NO: 75465 - RNA, 23 nt, Artificial Sequence
  Chemically synthesized
cauuacaucuuugagcauuuaca

SEQ ID NO: 75466 - RNA, 23 nt, Artificial Sequence
  Chemically synthesized
auuacaucuuugagcauuuacau

SEQ ID NO: 75467 - RNA, 23 nt, Artificial Sequence
  Chemically synthesized
acucucacucuaggacaaaaagg

SEQ ID NO: 75468 - RNA, 23 nt, Artificial Sequence
  Chemically synthesized
ccuauaugccagcuggaagugug

SEQ ID NO: 75469 - RNA, 23 nt, Artificial Sequence
  Chemically synthesized
cuauaugccagcuggaagugugu

SEQ ID NO: 75470 - RNA, 23 nt, Artificial Sequence
  Chemically synthesized
uauaugccagcuggaaguguguu

SEQ ID NO: 75471 - RNA, 23 nt, Artificial Sequence
  Chemically synthesized
auaugccagcuggaaguguguuu

SEQ ID NO: 75472 - RNA, 23 nt, Artificial Sequence
  Chemically synthesized
uaugccagcuggaaguguguuug

SEQ ID NO: 75473 - RNA, 23 nt, Artificial Sequence
  Chemically synthesized
uuaccggcaucacucuccucgca

SEQ ID NO: 75474 - RNA, 23 nt, Artificial Sequence
  Chemically synthesized
uuuccaucuuguuggucaacccc

SEQ ID NO: 75475 - RNA, 23 nt, Artificial Sequence
  Chemically synthesized
uuccaucuuguuggucaacccca

SEQ ID NO: 75476 - RNA, 23 nt, Artificial Sequence
  Chemically synthesized
uccaucuuguuggucaaccccac

SEQ ID NO: 75477 - RNA, 23 nt, Artificial Sequence
  Chemically synthesized
ugaagcagggagauaagcuagga

SEQ ID NO: 75478 - RNA, 23 nt, Artificial Sequence
  Chemically synthesized
uaagguacaaaugcaaggcaaug

SEQ ID NO: 75479 - RNA, 23 nt, Artificial Sequence
  Chemically synthesized
ccccuccagagcgaaauuccagu

SEQ ID NO: 75480 - RNA, 23 nt, Artificial Sequence
  Chemically synthesized
cccuccagagcgaaauuccaguu

SEQ ID NO: 75481 - RNA, 23 nt, Artificial Sequence
  Chemically synthesized
cucagacaucuuaacuaauguaa

SEQ ID NO: 75482 - RNA, 23 nt, Artificial Sequence
  Chemically synthesized
uuguucuguaggcuugggcaguu

SEQ ID NO: 75483 - RNA, 23 nt, Artificial Sequence
  Chemically synthesized
accgugcauccugaagaucaaag

SEQ ID NO: 75484 - RNA, 23 nt, Artificial Sequence
  Chemically synthesized
ccgugcauccugaagaucaaagg

SEQ ID NO: 75485 - RNA, 23 nt, Artificial Sequence
  Chemically synthesized
gacguuucucaggaaggaaaaag

SEQ ID NO: 75486 - RNA, 23 nt, Artificial Sequence
  Chemically synthesized
acguuucucaggaaggaaaaaga

SEQ ID NO: 75487 - RNA, 23 nt, Artificial Sequence
  Chemically synthesized
cguuucucaggaaggaaaaagac

SEQ ID NO: 75488 - RNA, 23 nt, Artificial Sequence
  Chemically synthesized
guuucucaggaaggaaaaagaca

SEQ ID NO: 75489 - RNA, 23 nt, Artificial Sequence
  Chemically synthesized
gucauguuugcuucuucagagcc

SEQ ID NO: 75490 - RNA, 23 nt, Artificial Sequence
  Chemically synthesized
ucauguuugcuucuucagagcca

SEQ ID NO: 75491 - RNA, 23 nt, Artificial Sequence
  Chemically synthesized
auggucucucagacaucuuaacu

SEQ ID NO: 75492 - RNA, 23 nt, Artificial Sequence
  Chemically synthesized
uggucucucagacaucuuaacua

SEQ ID NO: 75493 - RNA, 23 nt, Artificial Sequence
  Chemically synthesized
ccugaugaugaggaugcaugcca

SEQ ID NO: 75494 - RNA, 23 nt, Artificial Sequence
  Chemically synthesized
cugaugaugaggaugcaugccac

SEQ ID NO: 75495 - RNA, 23 nt, Artificial Sequence
  Chemically synthesized
accccucuuaggcagcaaguuga

SEQ ID NO: 75496 - RNA, 23 nt, Artificial Sequence
  Chemically synthesized
ccccucuuaggcagcaaguugag

SEQ ID NO: 75497 - RNA, 23 nt, Artificial Sequence
  Chemically synthesized
cccucuuaggcagcaaguugagg

SEQ ID NO: 75498 - RNA, 23 nt, Artificial Sequence
  Chemically synthesized
caggauucuagacagauuuggug

SEQ ID NO: 75499 - RNA, 23 nt, Artificial Sequence
  Chemically synthesized
agugcguucaccuuaaccagcau

SEQ ID NO: 75500 - RNA, 23 nt, Artificial Sequence
  Chemically synthesized
gugcguucaccuuaaccagcaug

SEQ ID NO: 75501 - RNA, 23 nt, Artificial Sequence
  Chemically synthesized
gcccaaacgagccaagagugucc

SEQ ID NO: 75502 - RNA, 23 nt, Artificial Sequence
  Chemically synthesized
guuucagauaagcagggauaaag

SEQ ID NO: 75503 - RNA, 23 nt, Artificial Sequence
  Chemically synthesized
uuucagauaagcagggauaaagg

SEQ ID NO: 75504 - RNA, 23 nt, Artificial Sequence
  Chemically synthesized
ugaugaugaggaugcaugccaca

SEQ ID NO: 75505 - RNA, 23 nt, Artificial Sequence
  Chemically synthesized
agccucgauguaccaggaaccuc

SEQ ID NO: 75506 - RNA, 23 nt, Artificial Sequence
  Chemically synthesized
gccucgauguaccaggaaccucg

SEQ ID NO: 75507 - RNA, 23 nt, Artificial Sequence
  Chemically synthesized
ccucgauguaccaggaaccucgu

SEQ ID NO: 75508 - RNA, 23 nt, Artificial Sequence
  Chemically synthesized
cucgauguaccaggaaccucguu

SEQ ID NO: 75509 - RNA, 23 nt, Artificial Sequence
  Chemically synthesized
augugagaacagacuggaggaag

SEQ ID NO: 75510 - RNA, 23 nt, Artificial Sequence
  Chemically synthesized
ugugagaacagacuggaggaaga

SEQ ID NO: 75511 - RNA, 23 nt, Artificial Sequence
  Chemically synthesized
uccaaacucucacucuaggacaa

SEQ ID NO: 75512 - RNA, 23 nt, Artificial Sequence
  Chemically synthesized
ggccuggagucccacacucaaag

SEQ ID NO: 75513 - RNA, 23 nt, Artificial Sequence
  Chemically synthesized
gccuggagucccacacucaaagg

SEQ ID NO: 75514 - RNA, 23 nt, Artificial Sequence
  Chemically synthesized
ccuggagucccacacucaaaggc

SEQ ID NO: 75515 - RNA, 23 nt, Artificial Sequence
  Chemically synthesized
cuggagucccacacucaaaggca

SEQ ID NO: 75516 - RNA, 23 nt, Artificial Sequence
  Chemically synthesized
uggagucccacacucaaaggcag

SEQ ID NO: 75517 - RNA, 23 nt, Artificial Sequence
  Chemically synthesized
uucacagaaaaggagcuggccug

SEQ ID NO: 75518 - RNA, 23 nt, Artificial Sequence
  Chemically synthesized
cagauaagcagggauaaagguuu

SEQ ID NO: 75519 - RNA, 23 nt, Artificial Sequence
  Chemically synthesized
uaaccuucccgauccuugauaag

SEQ ID NO: 75520 - RNA, 23 nt, Artificial Sequence
  Chemically synthesized
aacagaaaccgugcauccugaag

SEQ ID NO: 75521 - RNA, 23 nt, Artificial Sequence
  Chemically synthesized
ggacuuggcagcaaggcucacaa

SEQ ID NO: 75522 - RNA, 23 nt, Artificial Sequence
  Chemically synthesized
gacuuggcagcaaggcucacaaa

SEQ ID NO: 75523 - RNA, 23 nt, Artificial Sequence
  Chemically synthesized
acuuggcagcaaggcucacaaac

SEQ ID NO: 75524 - RNA, 23 nt, Artificial Sequence
  Chemically synthesized
cuuggcagcaaggcucacaaacc

SEQ ID NO: 75525 - RNA, 23 nt, Artificial Sequence
  Chemically synthesized
uuggcagcaaggcucacaaacca

SEQ ID NO: 75526 - RNA, 23 nt, Artificial Sequence
  Chemically synthesized
ugggaguggaaagguucucucuc

SEQ ID NO: 75527 - RNA, 23 nt, Artificial Sequence
  Chemically synthesized
ggcauagccgcauaucaugucug

SEQ ID NO: 75528 - RNA, 23 nt, Artificial Sequence
  Chemically synthesized
gcauagccgcauaucaugucuga

SEQ ID NO: 75529 - RNA, 23 nt, Artificial Sequence
  Chemically synthesized
cauagccgcauaucaugucugag

SEQ ID NO: 75530 - RNA, 23 nt, Artificial Sequence
  Chemically synthesized
auagccgcauaucaugucugagc

SEQ ID NO: 75531 - RNA, 23 nt, Artificial Sequence
  Chemically synthesized
uagccgcauaucaugucugagcg

SEQ ID NO: 75532 - RNA, 23 nt, Artificial Sequence
  Chemically synthesized
uacagagucuagggaaacacacc

SEQ ID NO: 75533 - RNA, 23 nt, Artificial Sequence
  Chemically synthesized
uggacaccuuccaaacucucacu

SEQ ID NO: 75534 - RNA, 23 nt, Artificial Sequence
  Chemically synthesized
ggacaccuuccaaacucucacuc

SEQ ID NO: 75535 - RNA, 23 nt, Artificial Sequence
  Chemically synthesized
gacaccuuccaaacucucacucu

SEQ ID NO: 75536 - RNA, 23 nt, Artificial Sequence
  Chemically synthesized
acaccuuccaaacucucacucua

SEQ ID NO: 75537 - RNA, 23 nt, Artificial Sequence
  Chemically synthesized
gaccccucuuaggcagcaaguug

SEQ ID NO: 75538 - RNA, 23 nt, Artificial Sequence
  Chemically synthesized
guugucaaagagcugaaaaaccu

SEQ ID NO: 75539 - RNA, 23 nt, Artificial Sequence
  Chemically synthesized
uugucaaagagcugaaaaaccuc

SEQ ID NO: 75540 - RNA, 23 nt, Artificial Sequence
  Chemically synthesized
ugucaaagagcugaaaaaccucu

SEQ ID NO: 75541 - RNA, 23 nt, Artificial Sequence
  Chemically synthesized
gucaaagagcugaaaaaccucuu

SEQ ID NO: 75542 - RNA, 23 nt, Artificial Sequence
  Chemically synthesized
ucaaagagcugaaaaaccucuug

SEQ ID NO: 75543 - RNA, 23 nt, Artificial Sequence
  Chemically synthesized
ccucuuggagcuggagcaguuuc

SEQ ID NO: 75544 - RNA, 23 nt, Artificial Sequence
  Chemically synthesized
cucuuggagcuggagcaguuucc

SEQ ID NO: 75545 - RNA, 23 nt, Artificial Sequence
  Chemically synthesized
ucuuggagcuggagcaguuuccc

SEQ ID NO: 75546 - RNA, 23 nt, Artificial Sequence
  Chemically synthesized
cuuggagcuggagcaguuuccca

SEQ ID NO: 75547 - RNA, 23 nt, Artificial Sequence
  Chemically synthesized
uuggagcuggagcaguuucccau

SEQ ID NO: 75548 - RNA, 23 nt, Artificial Sequence
  Chemically synthesized
auucugugccaggagcauaaccu

SEQ ID NO: 75549 - RNA, 23 nt, Artificial Sequence
  Chemically synthesized
uucugugccaggagcauaaccuu

SEQ ID NO: 75550 - RNA, 23 nt, Artificial Sequence
  Chemically synthesized
ucugugccaggagcauaaccuuc

SEQ ID NO: 75551 - RNA, 23 nt, Artificial Sequence
  Chemically synthesized
cugugccaggagcauaaccuucc

SEQ ID NO: 75552 - RNA, 23 nt, Artificial Sequence
  Chemically synthesized
ugugccaggagcauaaccuuccc

SEQ ID NO: 75553 - RNA, 23 nt, Artificial Sequence
  Chemically synthesized
gaaagagaaagcaggaacaaaga

SEQ ID NO: 75554 - RNA, 23 nt, Artificial Sequence
  Chemically synthesized
auaauaauccguguauauuguca

SEQ ID NO: 75555 - RNA, 23 nt, Artificial Sequence
  Chemically synthesized
uaauaauccguguauauugucaa

SEQ ID NO: 75556 - RNA, 23 nt, Artificial Sequence
  Chemically synthesized
aauaauccguguauauugucaaa

SEQ ID NO: 75557 - RNA, 23 nt, Artificial Sequence
  Chemically synthesized
auaauccguguauauugucaaaa

SEQ ID NO: 75558 - RNA, 23 nt, Artificial Sequence
  Chemically synthesized
uaauccguguauauugucaaaag

SEQ ID NO: 75559 - RNA, 23 nt, Artificial Sequence
  Chemically synthesized
ccgauccuugauaagugcguuca

SEQ ID NO: 75560 - RNA, 23 nt, Artificial Sequence
  Chemically synthesized
cgauccuugauaagugcguucac

SEQ ID NO: 75561 - RNA, 23 nt, Artificial Sequence
  Chemically synthesized
gauccuugauaagugcguucacc

SEQ ID NO: 75562 - RNA, 23 nt, Artificial Sequence
  Chemically synthesized
caggagcauaaccuucccgaucc

SEQ ID NO: 75563 - RNA, 23 nt, Artificial Sequence
  Chemically synthesized
aggagcauaaccuucccgauccu

SEQ ID NO: 75564 - RNA, 23 nt, Artificial Sequence
  Chemically synthesized
ggagcauaaccuucccgauccuu

SEQ ID NO: 75565 - RNA, 23 nt, Artificial Sequence
  Chemically synthesized
aggcucuaucacaccuccugugg

SEQ ID NO: 75566 - RNA, 23 nt, Artificial Sequence
  Chemically synthesized
ggcucuaucacaccuccuguggu

SEQ ID NO: 75567 - RNA, 23 nt, Artificial Sequence
  Chemically synthesized
gcucuaucacaccuccugugguc

SEQ ID NO: 75568 - RNA, 23 nt, Artificial Sequence
  Chemically synthesized
cucuaucacaccuccuguggucc

SEQ ID NO: 75569 - RNA, 23 nt, Artificial Sequence
  Chemically synthesized
ucuaucacaccuccuguggucca

SEQ ID NO: 75570 - RNA, 23 nt, Artificial Sequence
  Chemically synthesized
ggccuagcauuuugcuagggacc

SEQ ID NO: 75571 - RNA, 23 nt, Artificial Sequence
  Chemically synthesized
gccuagcauuuugcuagggacca

SEQ ID NO: 75572 - RNA, 23 nt, Artificial Sequence
  Chemically synthesized
ccuagcauuuugcuagggaccau

SEQ ID NO: 75573 - RNA, 23 nt, Artificial Sequence
  Chemically synthesized
cuagcauuuugcuagggaccaug

SEQ ID NO: 75574 - RNA, 23 nt, Artificial Sequence
  Chemically synthesized
ugagacuuccaugggcaaagauc

SEQ ID NO: 75575 - RNA, 23 nt, Artificial Sequence
  Chemically synthesized
gagacuuccaugggcaaagauca

SEQ ID NO: 75576 - RNA, 23 nt, Artificial Sequence
  Chemically synthesized
gacuuccaugggcaaagaucaau

SEQ ID NO: 75577 - RNA, 23 nt, Artificial Sequence
  Chemically synthesized
acuuccaugggcaaagaucaaua

SEQ ID NO: 75578 - RNA, 23 nt, Artificial Sequence
  Chemically synthesized
cgugguucuuuccaucuuguugg

SEQ ID NO: 75579 - RNA, 23 nt, Artificial Sequence
  Chemically synthesized
gugguucuuuccaucuuguuggu

SEQ ID NO: 75580 - RNA, 23 nt, Artificial Sequence
  Chemically synthesized
ugguucuuuccaucuuguugguc

SEQ ID NO: 75581 - RNA, 23 nt, Artificial Sequence
  Chemically synthesized
gagaacagacuggaggaagaaag

SEQ ID NO: 75582 - RNA, 23 nt, Artificial Sequence
  Chemically synthesized
agaacagacuggaggaagaaaga

SEQ ID NO: 75583 - RNA, 23 nt, Artificial Sequence
  Chemically synthesized
gaacagacuggaggaagaaagaa

SEQ ID NO: 75584 - RNA, 23 nt, Artificial Sequence
  Chemically synthesized
aacagacuggaggaagaaagaau

SEQ ID NO: 75585 - RNA, 23 nt, Artificial Sequence
  Chemically synthesized
acagacuggaggaagaaagaaug

SEQ ID NO: 75586 - RNA, 23 nt, Artificial Sequence
  Chemically synthesized
guacaaaugcaaggcaauguugg

SEQ ID NO: 75587 - RNA, 23 nt, Artificial Sequence
  Chemically synthesized
uacaaaugcaaggcaauguuggc

SEQ ID NO: 75588 - RNA, 23 nt, Artificial Sequence
  Chemically synthesized
acaaaugcaaggcaauguuggcu

SEQ ID NO: 75589 - RNA, 23 nt, Artificial Sequence
  Chemically synthesized
caaaugcaaggcaauguuggcug

SEQ ID NO: 75590 - RNA, 23 nt, Artificial Sequence
  Chemically synthesized
aaaugcaaggcaauguuggcuga

SEQ ID NO: 75591 - RNA, 23 nt, Artificial Sequence
  Chemically synthesized
gugcuucacagaaggcaucaaaa

SEQ ID NO: 75592 - RNA, 23 nt, Artificial Sequence
  Chemically synthesized
ugcuucacagaaggcaucaaaag

SEQ ID NO: 75593 - RNA, 23 nt, Artificial Sequence
  Chemically synthesized
gcuucacagaaggcaucaaaagc

SEQ ID NO: 75594 - RNA, 23 nt, Artificial Sequence
  Chemically synthesized
aaggugcgucucuagucauguuu

SEQ ID NO: 75595 - RNA, 23 nt, Artificial Sequence
  Chemically synthesized
aggugcgucucuagucauguuug

SEQ ID NO: 75596 - RNA, 23 nt, Artificial Sequence
  Chemically synthesized
cuugguacaugauggugaauaaa

SEQ ID NO: 75597 - RNA, 23 nt, Artificial Sequence
  Chemically synthesized
uugguacaugauggugaauaaaa

SEQ ID NO: 75598 - RNA, 23 nt, Artificial Sequence
  Chemically synthesized
ugguacaugauggugaauaaaac

SEQ ID NO: 75599 - RNA, 23 nt, Artificial Sequence
  Chemically synthesized
cuggaugagcucccucauuucca

SEQ ID NO: 75600 - RNA, 23 nt, Artificial Sequence
  Chemically synthesized
uggaugagcucccucauuuccaa

SEQ ID NO: 75601 - RNA, 23 nt, Artificial Sequence
  Chemically synthesized
ggaugagcucccucauuuccaag

SEQ ID NO: 75602 - RNA, 23 nt, Artificial Sequence
  Chemically synthesized
gaugagcucccucauuuccaagg

SEQ ID NO: 75603 - RNA, 23 nt, Artificial Sequence
  Chemically synthesized
augagcucccucauuuccaaggu

SEQ ID NO: 75604 - RNA, 23 nt, Artificial Sequence
  Chemically synthesized
aagguacaaaugcaaggcaaugu

SEQ ID NO: 75605 - RNA, 23 nt, Artificial Sequence
  Chemically synthesized
agguacaaaugcaaggcaauguu

SEQ ID NO: 75606 - RNA, 23 nt, Artificial Sequence
  Chemically synthesized
gguacaaaugcaaggcaauguug

SEQ ID NO: 75607 - RNA, 23 nt, Artificial Sequence
  Chemically synthesized
ugccacacacucccaauauccug

SEQ ID NO: 75608 - RNA, 23 nt, Artificial Sequence
  Chemically synthesized
agauaggagauggucucucagac

SEQ ID NO: 75609 - RNA, 23 nt, Artificial Sequence
  Chemically synthesized
gauaggagauggucucucagaca

SEQ ID NO: 75610 - RNA, 23 nt, Artificial Sequence
  Chemically synthesized
auaggagauggucucucagacau

SEQ ID NO: 75611 - RNA, 23 nt, Artificial Sequence
  Chemically synthesized
agagagauggacguuucucagga

SEQ ID NO: 75612 - RNA, 23 nt, Artificial Sequence
  Chemically synthesized
gagagauggacguuucucaggaa

SEQ ID NO: 75613 - RNA, 23 nt, Artificial Sequence
  Chemically synthesized
agagauggacguuucucaggaag

SEQ ID NO: 75614 - RNA, 23 nt, Artificial Sequence
  Chemically synthesized
gagauggacguuucucaggaagg

SEQ ID NO: 75615 - RNA, 23 nt, Artificial Sequence
  Chemically synthesized
agauggacguuucucaggaagga

SEQ ID NO: 75616 - RNA, 23 nt, Artificial Sequence
  Chemically synthesized
ugaaugaaagugggaauaguaag

SEQ ID NO: 75617 - RNA, 23 nt, Artificial Sequence
  Chemically synthesized
auggcacugaaauaaaagccaca

SEQ ID NO: 75618 - RNA, 23 nt, Artificial Sequence
  Chemically synthesized
agggagagagauggacguuucuc

SEQ ID NO: 75619 - RNA, 23 nt, Artificial Sequence
  Chemically synthesized
gggagagagauggacguuucuca

SEQ ID NO: 75620 - RNA, 23 nt, Artificial Sequence
  Chemically synthesized
ggagagagauggacguuucucag

SEQ ID NO: 75621 - RNA, 23 nt, Artificial Sequence
  Chemically synthesized
gagagagauggacguuucucagg

SEQ ID NO: 75622 - RNA, 23 nt, Artificial Sequence
  Chemically synthesized
guuaucucacacaugauaugucu

SEQ ID NO: 75623 - RNA, 23 nt, Artificial Sequence
  Chemically synthesized
uuaucucacacaugauaugucuu

SEQ ID NO: 75624 - RNA, 23 nt, Artificial Sequence
  Chemically synthesized
agugcacauugcucaacaccagu

SEQ ID NO: 75625 - RNA, 23 nt, Artificial Sequence
  Chemically synthesized
gugcacauugcucaacaccagug

SEQ ID NO: 75626 - RNA, 23 nt, Artificial Sequence
  Chemically synthesized
ugcacauugcucaacaccagugc

SEQ ID NO: 75627 - RNA, 23 nt, Artificial Sequence
  Chemically synthesized
agcuaagguuggcuugccuucuu

SEQ ID NO: 75628 - RNA, 23 nt, Artificial Sequence
  Chemically synthesized
gcuaagguuggcuugccuucuuc

SEQ ID NO: 75629 - RNA, 23 nt, Artificial Sequence
  Chemically synthesized
cuaagguuggcuugccuucuucc

SEQ ID NO: 75630 - RNA, 23 nt, Artificial Sequence
  Chemically synthesized
uaagguuggcuugccuucuuccc

SEQ ID NO: 75631 - RNA, 23 nt, Artificial Sequence
  Chemically synthesized
cuggagcaguuucccauccacac

SEQ ID NO: 75632 - RNA, 23 nt, Artificial Sequence
  Chemically synthesized
uggagcaguuucccauccacacc

SEQ ID NO: 75633 - RNA, 23 nt, Artificial Sequence
  Chemically synthesized
ugccaagcacuugguacaugaug

SEQ ID NO: 75634 - RNA, 23 nt, Artificial Sequence
  Chemically synthesized
aguuuaauacugaaagagaaagc

SEQ ID NO: 75635 - RNA, 23 nt, Artificial Sequence
  Chemically synthesized
auccugcgugguucuuuccaucu

SEQ ID NO: 75636 - RNA, 23 nt, Artificial Sequence
  Chemically synthesized
uccugcgugguucuuuccaucuu

SEQ ID NO: 75637 - RNA, 23 nt, Artificial Sequence
  Chemically synthesized
ccugcgugguucuuuccaucuug

SEQ ID NO: 75638 - RNA, 23 nt, Artificial Sequence
  Chemically synthesized
cugcgugguucuuuccaucuugu

SEQ ID NO: 75639 - RNA, 23 nt, Artificial Sequence
  Chemically synthesized
ugcgugguucuuuccaucuuguu

SEQ ID NO: 75640 - RNA, 23 nt, Artificial Sequence
  Chemically synthesized
aggcucacaaaccacccaaacaa

SEQ ID NO: 75641 - RNA, 23 nt, Artificial Sequence
  Chemically synthesized
ggcucacaaaccacccaaacaaa

SEQ ID NO: 75642 - RNA, 23 nt, Artificial Sequence
  Chemically synthesized
gcucacaaaccacccaaacaaau

SEQ ID NO: 75643 - RNA, 23 nt, Artificial Sequence
  Chemically synthesized
cucacaaaccacccaaacaaaua

SEQ ID NO: 75644 - RNA, 23 nt, Artificial Sequence
  Chemically synthesized
cugugcaaaauucugcaguuucu

SEQ ID NO: 75645 - RNA, 23 nt, Artificial Sequence
  Chemically synthesized
ugugcaaaauucugcaguuucuc

SEQ ID NO: 75646 - RNA, 23 nt, Artificial Sequence
  Chemically synthesized
augaugaggaugcaugccacaca

SEQ ID NO: 75647 - RNA, 23 nt, Artificial Sequence
  Chemically synthesized
ugaugaggaugcaugccacacac

SEQ ID NO: 75648 - RNA, 23 nt, Artificial Sequence
  Chemically synthesized
gaugaggaugcaugccacacacu

SEQ ID NO: 75649 - RNA, 23 nt, Artificial Sequence
  Chemically synthesized
augaggaugcaugccacacacuc

SEQ ID NO: 75650 - RNA, 23 nt, Artificial Sequence
  Chemically synthesized
ugaggaugcaugccacacacucc

SEQ ID NO: 75651 - RNA, 23 nt, Artificial Sequence
  Chemically synthesized
augucuucaaggagcuaaaaaug

SEQ ID NO: 75652 - RNA, 23 nt, Artificial Sequence
  Chemically synthesized
ccccacgaucagucucaucucca

SEQ ID NO: 75653 - RNA, 23 nt, Artificial Sequence
  Chemically synthesized
cccacgaucagucucaucuccac

SEQ ID NO: 75654 - RNA, 23 nt, Artificial Sequence
  Chemically synthesized
ccacgaucagucucaucuccacg

SEQ ID NO: 75655 - RNA, 23 nt, Artificial Sequence
  Chemically synthesized
ggaauucugugccaggagcauaa

SEQ ID NO: 75656 - RNA, 23 nt, Artificial Sequence
  Chemically synthesized
gaauucugugccaggagcauaac

SEQ ID NO: 75657 - RNA, 23 nt, Artificial Sequence
  Chemically synthesized
aauucugugccaggagcauaacc

SEQ ID NO: 75658 - RNA, 23 nt, Artificial Sequence
  Chemically synthesized
auuccuggcaauagguccaacca

SEQ ID NO: 75659 - RNA, 23 nt, Artificial Sequence
  Chemically synthesized
gggaauaguaagggagagagaug

SEQ ID NO: 75660 - RNA, 23 nt, Artificial Sequence
  Chemically synthesized
uggcacugaaauaaaagccacau

SEQ ID NO: 75661 - RNA, 23 nt, Artificial Sequence
  Chemically synthesized
ucacagaaaaggagcuggccugg

SEQ ID NO: 75662 - RNA, 23 nt, Artificial Sequence
  Chemically synthesized
ugauguccuucuccagaagaugu

SEQ ID NO: 75663 - RNA, 23 nt, Artificial Sequence
  Chemically synthesized
gauguccuucuccagaagauguu

SEQ ID NO: 75664 - RNA, 23 nt, Artificial Sequence
  Chemically synthesized
auguccuucuccagaagauguuc

SEQ ID NO: 75665 - RNA, 23 nt, Artificial Sequence
  Chemically synthesized
uguccuucuccagaagauguucu

SEQ ID NO: 75666 - RNA, 23 nt, Artificial Sequence
  Chemically synthesized
ucucaaauacuuccauacuaugu

SEQ ID NO: 75667 - RNA, 23 nt, Artificial Sequence
  Chemically synthesized
aacaauaacauguauggcacuga

SEQ ID NO: 75668 - RNA, 23 nt, Artificial Sequence
  Chemically synthesized
acaauaacauguauggcacugaa

SEQ ID NO: 75669 - RNA, 23 nt, Artificial Sequence
  Chemically synthesized
caauaacauguauggcacugaaa

SEQ ID NO: 75670 - RNA, 23 nt, Artificial Sequence
  Chemically synthesized
aauaacauguauggcacugaaau

SEQ ID NO: 75671 - RNA, 23 nt, Artificial Sequence
  Chemically synthesized
acaagguuucugcccucauuuac

SEQ ID NO: 75672 - RNA, 23 nt, Artificial Sequence
  Chemically synthesized
caagguuucugcccucauuuaca

SEQ ID NO: 75673 - RNA, 23 nt, Artificial Sequence
  Chemically synthesized
gaugaugggcacaggaaacaagu

SEQ ID NO: 75674 - RNA, 23 nt, Artificial Sequence
  Chemically synthesized
augaugggcacaggaaacaaguc

SEQ ID NO: 75675 - RNA, 23 nt, Artificial Sequence
  Chemically synthesized
ugaugggcacaggaaacaagucu

SEQ ID NO: 75676 - RNA, 23 nt, Artificial Sequence
  Chemically synthesized
gaugggcacaggaaacaagucug

SEQ ID NO: 75677 - RNA, 23 nt, Artificial Sequence
  Chemically synthesized
augggcacaggaaacaagucugg

SEQ ID NO: 75678 - RNA, 23 nt, Artificial Sequence
  Chemically synthesized
gaccaugggagaugugaaggaag

SEQ ID NO: 75679 - RNA, 23 nt, Artificial Sequence
  Chemically synthesized
accaugggagaugugaaggaagu

SEQ ID NO: 75680 - RNA, 23 nt, Artificial Sequence
  Chemically synthesized
ccaugggagaugugaaggaaguu

SEQ ID NO: 75681 - RNA, 23 nt, Artificial Sequence
  Chemically synthesized
caugggagaugugaaggaaguua

SEQ ID NO: 75682 - RNA, 23 nt, Artificial Sequence
  Chemically synthesized
augggagaugugaaggaaguuau

SEQ ID NO: 75683 - RNA, 23 nt, Artificial Sequence
  Chemically synthesized
aggauuguagcuaagguuggcuu

SEQ ID NO: 75684 - RNA, 23 nt, Artificial Sequence
  Chemically synthesized
gggcuggagcuuagcaagaaauc

SEQ ID NO: 75685 - RNA, 23 nt, Artificial Sequence
  Chemically synthesized
ggcuggagcuuagcaagaaauca

SEQ ID NO: 75686 - RNA, 23 nt, Artificial Sequence
  Chemically synthesized
caaaguacaaauaauaauccgug

SEQ ID NO: 75687 - RNA, 23 nt, Artificial Sequence
  Chemically synthesized
aaaguacaaauaauaauccgugu

SEQ ID NO: 75688 - RNA, 23 nt, Artificial Sequence
  Chemically synthesized
aaguacaaauaauaauccgugua

SEQ ID NO: 75689 - RNA, 23 nt, Artificial Sequence
  Chemically synthesized
aguacaaauaauaauccguguau

SEQ ID NO: 75690 - RNA, 23 nt, Artificial Sequence
  Chemically synthesized
guacaaauaauaauccguguaua

SEQ ID NO: 75691 - RNA, 23 nt, Artificial Sequence
  Chemically synthesized
agagcugaaaaaccucuuggagc

SEQ ID NO: 75692 - RNA, 23 nt, Artificial Sequence
  Chemically synthesized
gagcugaaaaaccucuuggagcu

SEQ ID NO: 75693 - RNA, 23 nt, Artificial Sequence
  Chemically synthesized
agcugaaaaaccucuuggagcug

SEQ ID NO: 75694 - RNA, 23 nt, Artificial Sequence
  Chemically synthesized
caagucugggagauucccacauc

SEQ ID NO: 75695 - RNA, 23 nt, Artificial Sequence
  Chemically synthesized
aagucugggagauucccacaucc

SEQ ID NO: 75696 - RNA, 23 nt, Artificial Sequence
  Chemically synthesized
agucugggagauucccacauccc

SEQ ID NO: 75697 - RNA, 23 nt, Artificial Sequence
  Chemically synthesized
gucugggagauucccacaucccu

SEQ ID NO: 75698 - RNA, 23 nt, Artificial Sequence
  Chemically synthesized
ucugggagauucccacaucccug

SEQ ID NO: 75699 - RNA, 23 nt, Artificial Sequence
  Chemically synthesized
ugcaccgguggaauucugugcca

SEQ ID NO: 75700 - RNA, 23 nt, Artificial Sequence
  Chemically synthesized
gcauaucacaagcccgcucagaa

SEQ ID NO: 75701 - RNA, 23 nt, Artificial Sequence
  Chemically synthesized
cauaucacaagcccgcucagaaa

SEQ ID NO: 75702 - RNA, 23 nt, Artificial Sequence
  Chemically synthesized
auaucacaagcccgcucagaaaa

SEQ ID NO: 75703 - RNA, 23 nt, Artificial Sequence
  Chemically synthesized
uaucacaagcccgcucagaaaac

SEQ ID NO: 75704 - RNA, 23 nt, Artificial Sequence
  Chemically synthesized
aucacaagcccgcucagaaaaca

SEQ ID NO: 75705 - RNA, 23 nt, Artificial Sequence
  Chemically synthesized
gaugaugaggaugcaugccacac

SEQ ID NO: 75706 - RNA, 23 nt, Artificial Sequence
  Chemically synthesized
uggcuuccacuuggcguggauga

SEQ ID NO: 75707 - RNA, 23 nt, Artificial Sequence
  Chemically synthesized
ggcuuccacuuggcguggaugau

SEQ ID NO: 75708 - RNA, 23 nt, Artificial Sequence
  Chemically synthesized
gcuuccacuuggcguggaugaug

SEQ ID NO: 75709 - RNA, 23 nt, Artificial Sequence
  Chemically synthesized
cuuccacuuggcguggaugaugg

SEQ ID NO: 75710 - RNA, 23 nt, Artificial Sequence
  Chemically synthesized
uuccacuuggcguggaugauggg

SEQ ID NO: 75711 - RNA, 23 nt, Artificial Sequence
  Chemically synthesized
aaacaaccaacgaaagaucuuug

SEQ ID NO: 75712 - RNA, 23 nt, Artificial Sequence
  Chemically synthesized
aacaaccaacgaaagaucuuuga

SEQ ID NO: 75713 - RNA, 23 nt, Artificial Sequence
  Chemically synthesized
acaaccaacgaaagaucuuugag

SEQ ID NO: 75714 - RNA, 23 nt, Artificial Sequence
  Chemically synthesized
caaccaacgaaagaucuuugaga

SEQ ID NO: 75715 - RNA, 23 nt, Artificial Sequence
  Chemically synthesized
aaccaacgaaagaucuuugagac

SEQ ID NO: 75716 - RNA, 23 nt, Artificial Sequence
  Chemically synthesized
caaccccacgaucagucucaucu

SEQ ID NO: 75717 - RNA, 23 nt, Artificial Sequence
  Chemically synthesized
aaccccacgaucagucucaucuc

SEQ ID NO: 75718 - RNA, 23 nt, Artificial Sequence
  Chemically synthesized
accccacgaucagucucaucucc

SEQ ID NO: 75719 - RNA, 23 nt, Artificial Sequence
  Chemically synthesized
caccauucuuccuggccuucucu

SEQ ID NO: 75720 - RNA, 23 nt, Artificial Sequence
  Chemically synthesized
uaggagauggucucucagacauc

SEQ ID NO: 75721 - RNA, 23 nt, Artificial Sequence
  Chemically synthesized
ccgcauaucaugucugagcgcgu

SEQ ID NO: 75722 - RNA, 23 nt, Artificial Sequence
  Chemically synthesized
cgcauaucaugucugagcgcgug

SEQ ID NO: 75723 - RNA, 23 nt, Artificial Sequence
  Chemically synthesized
gcauaucaugucugagcgcgugg

SEQ ID NO: 75724 - RNA, 23 nt, Artificial Sequence
  Chemically synthesized
cauaucaugucugagcgcguggg

SEQ ID NO: 75725 - RNA, 23 nt, Artificial Sequence
  Chemically synthesized
auaucaugucugagcgcgugggc

SEQ ID NO: 75726 - RNA, 23 nt, Artificial Sequence
  Chemically synthesized
guuccacauucuggcugaaacug

SEQ ID NO: 75727 - RNA, 23 nt, Artificial Sequence
  Chemically synthesized
caugccacacacucccaauaucc

SEQ ID NO: 75728 - RNA, 23 nt, Artificial Sequence
  Chemically synthesized
augccacacacucccaauauccu

SEQ ID NO: 75729 - RNA, 23 nt, Artificial Sequence
  Chemically synthesized
gauggacguuucucaggaaggaa

SEQ ID NO: 75730 - RNA, 23 nt, Artificial Sequence
  Chemically synthesized
auggacguuucucaggaaggaaa

SEQ ID NO: 75731 - RNA, 23 nt, Artificial Sequence
  Chemically synthesized
ugcauaucacaagcccgcucaga

SEQ ID NO: 75732 - RNA, 23 nt, Artificial Sequence
  Chemically synthesized
cuucuucagagccaaaagauaau

SEQ ID NO: 75733 - RNA, 23 nt, Artificial Sequence
  Chemically synthesized
cgaggcucauuucaguaacaaag

SEQ ID NO: 75734 - RNA, 23 nt, Artificial Sequence
  Chemically synthesized
augaaaugaagguaaagaaggga

SEQ ID NO: 75735 - RNA, 23 nt, Artificial Sequence
  Chemically synthesized
ucagauaagcagggauaaagguu

SEQ ID NO: 75736 - RNA, 23 nt, Artificial Sequence
  Chemically synthesized
gaacagggaaguugggaaguuuc

SEQ ID NO: 75737 - RNA, 23 nt, Artificial Sequence
  Chemically synthesized
aacagggaaguugggaaguuuca

SEQ ID NO: 75738 - RNA, 23 nt, Artificial Sequence
  Chemically synthesized
acagggaaguugggaaguuucag

SEQ ID NO: 75739 - RNA, 23 nt, Artificial Sequence
  Chemically synthesized
cagggaaguugggaaguuucaga

SEQ ID NO: 75740 - RNA, 23 nt, Artificial Sequence
  Chemically synthesized
augugccaagcacuugguacaug

SEQ ID NO: 75741 - RNA, 23 nt, Artificial Sequence
  Chemically synthesized
ugugccaagcacuugguacauga

SEQ ID NO: 75742 - RNA, 23 nt, Artificial Sequence
  Chemically synthesized
ugauugaaugaaagugggaauag

SEQ ID NO: 75743 - RNA, 23 nt, Artificial Sequence
  Chemically synthesized
gauugaaugaaagugggaauagu

SEQ ID NO: 75744 - RNA, 23 nt, Artificial Sequence
  Chemically synthesized
auugaaugaaagugggaauagua

SEQ ID NO: 75745 - RNA, 23 nt, Artificial Sequence
  Chemically synthesized
uugaaugaaagugggaauaguaa

SEQ ID NO: 75746 - RNA, 23 nt, Artificial Sequence
  Chemically synthesized
ggggauccugcgugguucuuucc

SEQ ID NO: 75747 - RNA, 23 nt, Artificial Sequence
  Chemically synthesized
gggauccugcgugguucuuucca

SEQ ID NO: 75748 - RNA, 23 nt, Artificial Sequence
  Chemically synthesized
ggauccugcgugguucuuuccau

SEQ ID NO: 75749 - RNA, 23 nt, Artificial Sequence
  Chemically synthesized
gauccugcgugguucuuuccauc

SEQ ID NO: 75750 - RNA, 23 nt, Artificial Sequence
  Chemically synthesized
gugccaggagcauaaccuucccg

SEQ ID NO: 75751 - RNA, 23 nt, Artificial Sequence
  Chemically synthesized
ugccaggagcauaaccuucccga

SEQ ID NO: 75752 - RNA, 23 nt, Artificial Sequence
  Chemically synthesized
cuacaaaagcuggaacugaacac

SEQ ID NO: 75753 - RNA, 23 nt, Artificial Sequence
  Chemically synthesized
uacaaaagcuggaacugaacaca

SEQ ID NO: 75754 - RNA, 23 nt, Artificial Sequence
  Chemically synthesized
acaaaagcuggaacugaacacaa

SEQ ID NO: 75755 - RNA, 23 nt, Artificial Sequence
  Chemically synthesized
caaaagcuggaacugaacacaaa

SEQ ID NO: 75756 - RNA, 23 nt, Artificial Sequence
  Chemically synthesized
aaaagcuggaacugaacacaaau

SEQ ID NO: 75757 - RNA, 23 nt, Artificial Sequence
  Chemically synthesized
cuuccaugggcaaagaucaauaa

SEQ ID NO: 75758 - RNA, 23 nt, Artificial Sequence
  Chemically synthesized
uggaaagguucucucucucaaau

SEQ ID NO: 75759 - RNA, 23 nt, Artificial Sequence
  Chemically synthesized
aauaauaauccguguauauuguc

SEQ ID NO: 75760 - RNA, 23 nt, Artificial Sequence
  Chemically synthesized
accucguuugguguuccgcaugg

SEQ ID NO: 75761 - RNA, 23 nt, Artificial Sequence
  Chemically synthesized
ccucguuugguguuccgcauggc

SEQ ID NO: 75762 - RNA, 23 nt, Artificial Sequence
  Chemically synthesized
cucguuugguguuccgcauggcg

SEQ ID NO: 75763 - RNA, 23 nt, Artificial Sequence
  Chemically synthesized
ucguuugguguuccgcauggcgg

SEQ ID NO: 75764 - RNA, 23 nt, Artificial Sequence
  Chemically synthesized
gcucuucaacugcagcugaaaca

SEQ ID NO: 75765 - RNA, 23 nt, Artificial Sequence
  Chemically synthesized
cucuucaacugcagcugaaacau

SEQ ID NO: 75766 - RNA, 23 nt, Artificial Sequence
  Chemically synthesized
ucuucaacugcagcugaaacauu

SEQ ID NO: 75767 - RNA, 23 nt, Artificial Sequence
  Chemically synthesized
aggaaacaagucugggagauucc

SEQ ID NO: 75768 - RNA, 23 nt, Artificial Sequence
  Chemically synthesized
ggaaacaagucugggagauuccc

SEQ ID NO: 75769 - RNA, 23 nt, Artificial Sequence
  Chemically synthesized
gaaacaagucugggagauuccca

SEQ ID NO: 75770 - RNA, 23 nt, Artificial Sequence
  Chemically synthesized
aaacaagucugggagauucccac

SEQ ID NO: 75771 - RNA, 23 nt, Artificial Sequence
  Chemically synthesized
aacaagucugggagauucccaca

SEQ ID NO: 75772 - RNA, 23 nt, Artificial Sequence
  Chemically synthesized
cagucucaucuucggcaacuuuu

SEQ ID NO: 75773 - RNA, 23 nt, Artificial Sequence
  Chemically synthesized
uaucaugucugagcgcgugggca

SEQ ID NO: 75774 - RNA, 23 nt, Artificial Sequence
  Chemically synthesized
gagcuaaaaaugccaguggauaa

SEQ ID NO: 75775 - RNA, 23 nt, Artificial Sequence
  Chemically synthesized
agcuaaaaaugccaguggauaaa

SEQ ID NO: 75776 - RNA, 23 nt, Artificial Sequence
  Chemically synthesized
gcuaaaaaugccaguggauaaaa

SEQ ID NO: 75777 - RNA, 23 nt, Artificial Sequence
  Chemically synthesized
auaacauguauggcacugaaaua

SEQ ID NO: 75778 - RNA, 23 nt, Artificial Sequence
  Chemically synthesized
aggaugaaaugaagguaaagaag

SEQ ID NO: 75779 - RNA, 23 nt, Artificial Sequence
  Chemically synthesized
ggaugaaaugaagguaaagaagg

SEQ ID NO: 75780 - RNA, 23 nt, Artificial Sequence
  Chemically synthesized
gaugaaaugaagguaaagaaggg

SEQ ID NO: 75781 - RNA, 23 nt, Artificial Sequence
  Chemically synthesized
ggccuggaugagcucccucauuu

SEQ ID NO: 75782 - RNA, 23 nt, Artificial Sequence
  Chemically synthesized
gccuggaugagcucccucauuuc

SEQ ID NO: 75783 - RNA, 23 nt, Artificial Sequence
  Chemically synthesized
ccuggaugagcucccucauuucc

SEQ ID NO: 75784 - RNA, 23 nt, Artificial Sequence
  Chemically synthesized
cuaucacaccuccugugguccag

SEQ ID NO: 75785 - RNA, 23 nt, Artificial Sequence
  Chemically synthesized
uaucacaccuccugugguccagu

SEQ ID NO: 75786 - RNA, 23 nt, Artificial Sequence
  Chemically synthesized
uucagauaagcagggauaaaggu

SEQ ID NO: 75787 - RNA, 23 nt, Artificial Sequence
  Chemically synthesized
aaaggcagagaugaugggcacag

SEQ ID NO: 75788 - RNA, 23 nt, Artificial Sequence
  Chemically synthesized
aggcauagccgcauaucaugucu

SEQ ID NO: 75789 - RNA, 23 nt, Artificial Sequence
  Chemically synthesized
aaacucucacucuaggacaaaaa

SEQ ID NO: 75790 - RNA, 23 nt, Artificial Sequence
  Chemically synthesized
aacucucacucuaggacaaaaag

SEQ ID NO: 75791 - RNA, 23 nt, Artificial Sequence
  Chemically synthesized
uggacguuucucaggaaggaaaa

SEQ ID NO: 75792 - RNA, 23 nt, Artificial Sequence
  Chemically synthesized
aguacugaagggaacgcacaggc

SEQ ID NO: 75793 - RNA, 23 nt, Artificial Sequence
  Chemically synthesized
guacugaagggaacgcacaggcc

SEQ ID NO: 75794 - RNA, 23 nt, Artificial Sequence
  Chemically synthesized
uacugaagggaacgcacaggccg

SEQ ID NO: 75795 - RNA, 23 nt, Artificial Sequence
  Chemically synthesized
ucuacaaaagcuggaacugaaca

SEQ ID NO: 75796 - RNA, 23 nt, Artificial Sequence
  Chemically synthesized
agggaccaugggagaugugaagg

SEQ ID NO: 75797 - RNA, 23 nt, Artificial Sequence
  Chemically synthesized
gggaccaugggagaugugaagga

SEQ ID NO: 75798 - RNA, 23 nt, Artificial Sequence
  Chemically synthesized
ggaccaugggagaugugaaggaa

SEQ ID NO: 75799 - RNA, 19 nt, Artificial Sequence
  Chemically synthesized
cguggaggaggcaauuaga

SEQ ID NO: 75800 - RNA, 19 nt, Artificial Sequence
  Chemically synthesized
gaaaaucaggcucuucaca

SEQ ID NO: 75801 - RNA, 19 nt, Artificial Sequence
  Chemically synthesized
aaaaucaggcucuucacau

SEQ ID NO: 75802 - RNA, 19 nt, Artificial Sequence
  Chemically synthesized
cguucuacugguaugaaga

SEQ ID NO: 75803 - RNA, 19 nt, Artificial Sequence
  Chemically synthesized
gguucuggcgauuucaaca

SEQ ID NO: 75804 - RNA, 19 nt, Artificial Sequence
  Chemically synthesized
cuuuacacugggacgaaaa

SEQ ID NO: 75805 - RNA, 19 nt, Artificial Sequence
  Chemically synthesized
cacugaauugcuaaggaca

SEQ ID NO: 75806 - RNA, 19 nt, Artificial Sequence
  Chemically synthesized
aaaagaugugccacuugua

SEQ ID NO: 75807 - RNA, 19 nt, Artificial Sequence
  Chemically synthesized
aggugagggagaagaaauu

SEQ ID NO: 75808 - RNA, 19 nt, Artificial Sequence
  Chemically synthesized
ccuuacuaacgacccaaca

SEQ ID NO: 75809 - RNA, 19 nt, Artificial Sequence
  Chemically synthesized
gauuugccgggaugcaaga

SEQ ID NO: 75810 - RNA, 19 nt, Artificial Sequence
  Chemically synthesized
aguuauuuuggguucaaca

SEQ ID NO: 75811 - RNA, 19 nt, Artificial Sequence
  Chemically synthesized
ucucgaggacacuucaaaa

SEQ ID NO: 75812 - RNA, 19 nt, Artificial Sequence
  Chemically synthesized
uguucgaggccaaacccaa

SEQ ID NO: 75813 - RNA, 19 nt, Artificial Sequence
  Chemically synthesized
gagucuuuccauuacacac

SEQ ID NO: 75814 - RNA, 19 nt, Artificial Sequence
  Chemically synthesized
aaaaagcguggcuuuaaaa

SEQ ID NO: 75815 - RNA, 19 nt, Artificial Sequence
  Chemically synthesized
uagagaccgcuaugcagaa

SEQ ID NO: 75816 - RNA, 19 nt, Artificial Sequence
  Chemically synthesized
aguuguucugguacacaca

SEQ ID NO: 75817 - RNA, 19 nt, Artificial Sequence
  Chemically synthesized
uguucuucuguggaccuaa

SEQ ID NO: 75818 - RNA, 19 nt, Artificial Sequence
  Chemically synthesized
cuuuggaacugcccugaca

SEQ ID NO: 75819 - RNA, 19 nt, Artificial Sequence
  Chemically synthesized
aaauuuccugacagccgaa

SEQ ID NO: 75820 - RNA, 19 nt, Artificial Sequence
  Chemically synthesized
acuggucgccuaugggaua

SEQ ID NO: 75821 - RNA, 19 nt, Artificial Sequence
  Chemically synthesized
uggaggaggcaauuagaca

SEQ ID NO: 75822 - RNA, 19 nt, Artificial Sequence
  Chemically synthesized
cugugacggccuguugaua

SEQ ID NO: 75823 - RNA, 19 nt, Artificial Sequence
  Chemically synthesized
uagguucuggcgauuucaa

SEQ ID NO: 75824 - RNA, 19 nt, Artificial Sequence
  Chemically synthesized
uugugaacaguacacuaua

SEQ ID NO: 75825 - RNA, 19 nt, Artificial Sequence
  Chemically synthesized
aacugcaugcuaauucuaa

SEQ ID NO: 75826 - RNA, 19 nt, Artificial Sequence
  Chemically synthesized
uauugugaacaguacacua

SEQ ID NO: 75827 - RNA, 19 nt, Artificial Sequence
  Chemically synthesized
ccaaagaacuccaccagga

SEQ ID NO: 75828 - RNA, 19 nt, Artificial Sequence
  Chemically synthesized
uucuauuacaacaaggaga

SEQ ID NO: 75829 - RNA, 19 nt, Artificial Sequence
  Chemically synthesized
cuguagagaccgcuaugca

SEQ ID NO: 75830 - RNA, 19 nt, Artificial Sequence
  Chemically synthesized
cauggcugggaauaaauuu

SEQ ID NO: 75831 - RNA, 19 nt, Artificial Sequence
  Chemically synthesized
ccuaaagcucucucgagga

SEQ ID NO: 75832 - RNA, 19 nt, Artificial Sequence
  Chemically synthesized
aacaaugaguucaagcaga

SEQ ID NO: 75833 - RNA, 19 nt, Artificial Sequence
  Chemically synthesized
ucuauaugguacaaaugca

SEQ ID NO: 75834 - RNA, 19 nt, Artificial Sequence
  Chemically synthesized
ucgucaacugaguucauca

SEQ ID NO: 75835 - RNA, 19 nt, Artificial Sequence
  Chemically synthesized
caauuuucuggcaaggaac

SEQ ID NO: 75836 - RNA, 19 nt, Artificial Sequence
  Chemically synthesized
ucaugaccucgucaacuga

SEQ ID NO: 75837 - RNA, 19 nt, Artificial Sequence
  Chemically synthesized
aguugggaacuggugaaua

SEQ ID NO: 75838 - RNA, 19 nt, Artificial Sequence
  Chemically synthesized
cauuucuauuacaacaagg

SEQ ID NO: 75839 - RNA, 19 nt, Artificial Sequence
  Chemically synthesized
gucucuccaccauauuagu

SEQ ID NO: 75840 - RNA, 19 nt, Artificial Sequence
  Chemically synthesized
cuuaccggcugggaugaaa

SEQ ID NO: 75841 - RNA, 19 nt, Artificial Sequence
  Chemically synthesized
cucucucugcacaacauca

SEQ ID NO: 75842 - RNA, 19 nt, Artificial Sequence
  Chemically synthesized
cuggcuuuagucuugauca

SEQ ID NO: 75843 - RNA, 19 nt, Artificial Sequence
  Chemically synthesized
aguucaagcagauugccua

SEQ ID NO: 75844 - RNA, 19 nt, Artificial Sequence
  Chemically synthesized
auuacaggcuuaaagcaga

SEQ ID NO: 75845 - RNA, 19 nt, Artificial Sequence
  Chemically synthesized
cagugcccagccauaucuu

SEQ ID NO: 75846 - RNA, 19 nt, Artificial Sequence
  Chemically synthesized
agaaguugucauuaccaag

SEQ ID NO: 75847 - RNA, 19 nt, Artificial Sequence
  Chemically synthesized
acugaauugcuaaggacaa

SEQ ID NO: 75848 - RNA, 19 nt, Artificial Sequence
  Chemically synthesized
cagucgaaaccuuauuuca

SEQ ID NO: 75849 - RNA, 19 nt, Artificial Sequence
  Chemically synthesized
acacuauaccauacuuccu

SEQ ID NO: 75850 - RNA, 19 nt, Artificial Sequence
  Chemically synthesized
gugccacuuguauucauca

SEQ ID NO: 75851 - RNA, 19 nt, Artificial Sequence
  Chemically synthesized
cauauauuucuuaccggcu

SEQ ID NO: 75852 - RNA, 19 nt, Artificial Sequence
  Chemically synthesized
gaugcaagagcuuuugagu

SEQ ID NO: 75853 - RNA, 19 nt, Artificial Sequence
  Chemically synthesized
caaggagagcuucuagacu

SEQ ID NO: 75854 - RNA, 19 nt, Artificial Sequence
  Chemically synthesized
acugggacgaaaauacuga

SEQ ID NO: 75855 - RNA, 19 nt, Artificial Sequence
  Chemically synthesized
cuuuugagugguuugcuga

SEQ ID NO: 75856 - RNA, 19 nt, Artificial Sequence
  Chemically synthesized
uggauuugccgggaugcaa

SEQ ID NO: 75857 - RNA, 19 nt, Artificial Sequence
  Chemically synthesized
gcuggauuuugaaugaggg

SEQ ID NO: 75858 - RNA, 19 nt, Artificial Sequence
  Chemically synthesized
guuaaugcaaccauccaca

SEQ ID NO: 75859 - RNA, 19 nt, Artificial Sequence
  Chemically synthesized
cuuacuaacgacccaacau

SEQ ID NO: 75860 - RNA, 19 nt, Artificial Sequence
  Chemically synthesized
ucgaggacacuucaaaaga

SEQ ID NO: 75861 - RNA, 19 nt, Artificial Sequence
  Chemically synthesized
ggcugggaugaaaaucagg

SEQ ID NO: 75862 - RNA, 19 nt, Artificial Sequence
  Chemically synthesized
acuagggaagcccuuacua

SEQ ID NO: 75863 - RNA, 19 nt, Artificial Sequence
  Chemically synthesized
cuguuaaugcaaccaucca

SEQ ID NO: 75864 - RNA, 19 nt, Artificial Sequence
  Chemically synthesized
cauucauaagaggaacaag

SEQ ID NO: 75865 - RNA, 19 nt, Artificial Sequence
  Chemically synthesized
ugaaaaucaggcucuucac

SEQ ID NO: 75866 - RNA, 19 nt, Artificial Sequence
  Chemically synthesized
uuaccggcugggaugaaaa

SEQ ID NO: 75867 - RNA, 19 nt, Artificial Sequence
  Chemically synthesized
cagccauaucuucgcugga

SEQ ID NO: 75868 - RNA, 19 nt, Artificial Sequence
  Chemically synthesized
aaguauuugcugcagagga

SEQ ID NO: 75869 - RNA, 19 nt, Artificial Sequence
  Chemically synthesized
acugguaugaagaggagga

SEQ ID NO: 75870 - RNA, 19 nt, Artificial Sequence
  Chemically synthesized
acacugggacgaaaauacu

SEQ ID NO: 75871 - RNA, 19 nt, Artificial Sequence
  Chemically synthesized
cuuuccauuacacacgagu

SEQ ID NO: 75872 - RNA, 19 nt, Artificial Sequence
  Chemically synthesized
guaugaagaggaggagucu

SEQ ID NO: 75873 - RNA, 19 nt, Artificial Sequence
  Chemically synthesized
aacaaggagagcuucuaga

SEQ ID NO: 75874 - RNA, 19 nt, Artificial Sequence
  Chemically synthesized
cucucucgaggacacuuca

SEQ ID NO: 75875 - RNA, 19 nt, Artificial Sequence
  Chemically synthesized
uggcguguucuucugugga

SEQ ID NO: 75876 - RNA, 19 nt, Artificial Sequence
  Chemically synthesized
aagguguauuucuacugga

SEQ ID NO: 75877 - RNA, 19 nt, Artificial Sequence
  Chemically synthesized
uaugaguuguucugguaca

SEQ ID NO: 75878 - RNA, 19 nt, Artificial Sequence
  Chemically synthesized
ggucaaguccaggcauugu

SEQ ID NO: 75879 - RNA, 19 nt, Artificial Sequence
  Chemically synthesized
gcuucuagacuuuggaggu

SEQ ID NO: 75880 - RNA, 19 nt, Artificial Sequence
  Chemically synthesized
cugacagauguauuucacu

SEQ ID NO: 75881 - RNA, 19 nt, Artificial Sequence
  Chemically synthesized
cuuggaaauggauuuuagg

SEQ ID NO: 75882 - RNA, 19 nt, Artificial Sequence
  Chemically synthesized
aaacuggucgccuauggga

SEQ ID NO: 75883 - RNA, 19 nt, Artificial Sequence
  Chemically synthesized
uucauaagaggaacaagua

SEQ ID NO: 75884 - RNA, 19 nt, Artificial Sequence
  Chemically synthesized
uugggaacuggugaauaau

SEQ ID NO: 75885 - RNA, 19 nt, Artificial Sequence
  Chemically synthesized
augaaaaucaggcucuuca

SEQ ID NO: 75886 - RNA, 19 nt, Artificial Sequence
  Chemically synthesized
aucucuuacucucccugga

SEQ ID NO: 75887 - RNA, 19 nt, Artificial Sequence
  Chemically synthesized
guagagaccgcuaugcaga

SEQ ID NO: 75888 - RNA, 19 nt, Artificial Sequence
  Chemically synthesized
agucucucucugcacaaca

SEQ ID NO: 75889 - RNA, 19 nt, Artificial Sequence
  Chemically synthesized
aggccaaacccaagacagu

SEQ ID NO: 75890 - RNA, 19 nt, Artificial Sequence
  Chemically synthesized
aacuggucgccuaugggau

SEQ ID NO: 75891 - RNA, 19 nt, Artificial Sequence
  Chemically synthesized
uuuacacugggacgaaaau

SEQ ID NO: 75892 - RNA, 19 nt, Artificial Sequence
  Chemically synthesized
caugaaaaagcguggcuuu

SEQ ID NO: 75893 - RNA, 19 nt, Artificial Sequence
  Chemically synthesized
uuagguucuggcgauuuca

SEQ ID NO: 75894 - RNA, 19 nt, Artificial Sequence
  Chemically synthesized
agucgaaaccuuauuucau

SEQ ID NO: 75895 - RNA, 19 nt, Artificial Sequence
  Chemically synthesized
guugauaugagcucccagu

SEQ ID NO: 75896 - RNA, 19 nt, Artificial Sequence
  Chemically synthesized
uguugauaugagcucccag

SEQ ID NO: 75897 - RNA, 19 nt, Artificial Sequence
  Chemically synthesized
ccaccaggaauuccuguga

SEQ ID NO: 75898 - RNA, 19 nt, Artificial Sequence
  Chemically synthesized
aaauacugacgugauuaca

SEQ ID NO: 75899 - RNA, 19 nt, Artificial Sequence
  Chemically synthesized
cugggacgaaaauacugac

SEQ ID NO: 75900 - RNA, 19 nt, Artificial Sequence
  Chemically synthesized
uguaugcaugugaaagaau

SEQ ID NO: 75901 - RNA, 19 nt, Artificial Sequence
  Chemically synthesized
ugaacaguacacuauacca

SEQ ID NO: 75902 - RNA, 19 nt, Artificial Sequence
  Chemically synthesized
ucaaguccaggcauugugu

SEQ ID NO: 75903 - RNA, 19 nt, Artificial Sequence
  Chemically synthesized
ucuauuacaacaaggagag

SEQ ID NO: 75904 - RNA, 19 nt, Artificial Sequence
  Chemically synthesized
agcagauugccuacaauca

SEQ ID NO: 75905 - RNA, 19 nt, Artificial Sequence
  Chemically synthesized
agugguuugcugaucucuu

SEQ ID NO: 75906 - RNA, 19 nt, Artificial Sequence
  Chemically synthesized
guacaaaugcagugaggca

SEQ ID NO: 75907 - RNA, 19 nt, Artificial Sequence
  Chemically synthesized
cuggauuuugaaugagggu

SEQ ID NO: 75908 - RNA, 19 nt, Artificial Sequence
  Chemically synthesized
gauguauuucacuacccag

SEQ ID NO: 75909 - RNA, 19 nt, Artificial Sequence
  Chemically synthesized
ccaggaagacuuuuucagc

SEQ ID NO: 75910 - RNA, 19 nt, Artificial Sequence
  Chemically synthesized
guccuggaacuucacauga

SEQ ID NO: 75911 - RNA, 19 nt, Artificial Sequence
  Chemically synthesized
agguucuggcgauuucaac

SEQ ID NO: 75912 - RNA, 19 nt, Artificial Sequence
  Chemically synthesized
cucggcuuggaaauggauu

SEQ ID NO: 75913 - RNA, 19 nt, Artificial Sequence
  Chemically synthesized
auuagacaaaaaccucaga

SEQ ID NO: 75914 - RNA, 19 nt, Artificial Sequence
  Chemically synthesized
aguauuugcugcagaggac

SEQ ID NO: 75915 - RNA, 19 nt, Artificial Sequence
  Chemically synthesized
uuuccauuacacacgaguu

SEQ ID NO: 75916 - RNA, 19 nt, Artificial Sequence
  Chemically synthesized
ugugacggccuguugauau

SEQ ID NO: 75917 - RNA, 19 nt, Artificial Sequence
  Chemically synthesized
cacugggacgaaaauacug

SEQ ID NO: 75918 - RNA, 19 nt, Artificial Sequence
  Chemically synthesized
uuuugagugguuugcugau

SEQ ID NO: 75919 - RNA, 19 nt, Artificial Sequence
  Chemically synthesized
acuuuuucagcgugcacau

SEQ ID NO: 75920 - RNA, 19 nt, Artificial Sequence
  Chemically synthesized
ugaucaugaccucgucaac

SEQ ID NO: 75921 - RNA, 19 nt, Artificial Sequence
  Chemically synthesized
uaaggacaauagcaggcgu

SEQ ID NO: 75922 - RNA, 19 nt, Artificial Sequence
  Chemically synthesized
ucuacugguaugaagagga

SEQ ID NO: 75923 - RNA, 19 nt, Artificial Sequence
  Chemically synthesized
aaucaggcucuucacauag

SEQ ID NO: 75924 - RNA, 19 nt, Artificial Sequence
  Chemically synthesized
ucuuaccggcugggaugaa

SEQ ID NO: 75925 - RNA, 19 nt, Artificial Sequence
  Chemically synthesized
acaaaugcagugaggcaca

SEQ ID NO: 75926 - RNA, 19 nt, Artificial Sequence
  Chemically synthesized
aaaaccucagauuucacaa

SEQ ID NO: 75927 - RNA, 19 nt, Artificial Sequence
  Chemically synthesized
uaacgacccaacauccaga

SEQ ID NO: 75928 - RNA, 19 nt, Artificial Sequence
  Chemically synthesized
cuuuggaggucaaguccag

SEQ ID NO: 75929 - RNA, 19 nt, Artificial Sequence
  Chemically synthesized
aaagcagaagaccuucuau

SEQ ID NO: 75930 - RNA, 19 nt, Artificial Sequence
  Chemically synthesized
auuucuuaccggcugggau

SEQ ID NO: 75931 - RNA, 19 nt, Artificial Sequence
  Chemically synthesized
ucauauauuucuuaccggc

SEQ ID NO: 75932 - RNA, 19 nt, Artificial Sequence
  Chemically synthesized
aacugcccugacagaugua

SEQ ID NO: 75933 - RNA, 19 nt, Artificial Sequence
  Chemically synthesized
auuuccugacagccgaaga

SEQ ID NO: 75934 - RNA, 19 nt, Artificial Sequence
  Chemically synthesized
acaacaucaccuucuguag

SEQ ID NO: 75935 - RNA, 19 nt, Artificial Sequence
  Chemically synthesized
ucgccuaugggauagcugu

SEQ ID NO: 75936 - RNA, 19 nt, Artificial Sequence
  Chemically synthesized
ugucauauacaacagaaca

SEQ ID NO: 75937 - RNA, 19 nt, Artificial Sequence
  Chemically synthesized
uuucuauuacaacaaggag

SEQ ID NO: 75938 - RNA, 19 nt, Artificial Sequence
  Chemically synthesized
gagugguuugcugaucucu

SEQ ID NO: 75939 - RNA, 19 nt, Artificial Sequence
  Chemically synthesized
cugagcaagguguauuucu

SEQ ID NO: 75940 - RNA, 19 nt, Artificial Sequence
  Chemically synthesized
aaaugcagugaggcacaga

SEQ ID NO: 75941 - RNA, 19 nt, Artificial Sequence
  Chemically synthesized
aguacaucuuggugcagug

SEQ ID NO: 75942 - RNA, 19 nt, Artificial Sequence
  Chemically synthesized
uguggucuuguaugcaugu

SEQ ID NO: 75943 - RNA, 19 nt, Artificial Sequence
  Chemically synthesized
uguucugguacacacacca

SEQ ID NO: 75944 - RNA, 19 nt, Artificial Sequence
  Chemically synthesized
caaaaaccucagauuucac

SEQ ID NO: 75945 - RNA, 19 nt, Artificial Sequence
  Chemically synthesized
guggaggaggcaauuagac

SEQ ID NO: 75946 - RNA, 19 nt, Artificial Sequence
  Chemically synthesized
ucuaauaccugucagucga

SEQ ID NO: 75947 - RNA, 19 nt, Artificial Sequence
  Chemically synthesized
aacuauugugaacaguaca

SEQ ID NO: 75948 - RNA, 19 nt, Artificial Sequence
  Chemically synthesized
ugacggccuguugauauga

SEQ ID NO: 75949 - RNA, 19 nt, Artificial Sequence
  Chemically synthesized
aagaugugccacuuguauu

SEQ ID NO: 75950 - RNA, 19 nt, Artificial Sequence
  Chemically synthesized
cuucaaaagaugugccacu

SEQ ID NO: 75951 - RNA, 19 nt, Artificial Sequence
  Chemically synthesized
cguguucuucuguggaccu

SEQ ID NO: 75952 - RNA, 19 nt, Artificial Sequence
  Chemically synthesized
ugauuacaggcuuaaagca

SEQ ID NO: 75953 - RNA, 19 nt, Artificial Sequence
  Chemically synthesized
uaugcagaauggcagacag

SEQ ID NO: 75954 - RNA, 19 nt, Artificial Sequence
  Chemically synthesized
ucugguacacacaccaugu

SEQ ID NO: 75955 - RNA, 19 nt, Artificial Sequence
  Chemically synthesized
acuaacgacccaacaucca

SEQ ID NO: 75956 - RNA, 19 nt, Artificial Sequence
  Chemically synthesized
ugguaugaagaggaggagu

SEQ ID NO: 75957 - RNA, 19 nt, Artificial Sequence
  Chemically synthesized
augagcucccaguugggaa

SEQ ID NO: 75958 - RNA, 19 nt, Artificial Sequence
  Chemically synthesized
aguauuggcguguucuucu

SEQ ID NO: 75959 - RNA, 19 nt, Artificial Sequence
  Chemically synthesized
uaccggcugggaugaaaau

SEQ ID NO: 75960 - RNA, 19 nt, Artificial Sequence
  Chemically synthesized
aagacuuuuucagcgugca

SEQ ID NO: 75961 - RNA, 19 nt, Artificial Sequence
  Chemically synthesized
uggcgauuucaacaagaag

SEQ ID NO: 75962 - RNA, 19 nt, Artificial Sequence
  Chemically synthesized
aagacagucucucucugca

SEQ ID NO: 75963 - RNA, 19 nt, Artificial Sequence
  Chemically synthesized
gagggagaagaaauuuccu

SEQ ID NO: 75964 - RNA, 19 nt, Artificial Sequence
  Chemically synthesized
aggacaauagcaggcguca

SEQ ID NO: 75965 - RNA, 19 nt, Artificial Sequence
  Chemically synthesized
uucuggccgcacuuuccaa

SEQ ID NO: 75966 - RNA, 19 nt, Artificial Sequence
  Chemically synthesized
gagcuucuagacuuuggag

SEQ ID NO: 75967 - RNA, 19 nt, Artificial Sequence
  Chemically synthesized
acuuguauucaucagcuga

SEQ ID NO: 75968 - RNA, 19 nt, Artificial Sequence
  Chemically synthesized
ucucucgaggacacuucaa

SEQ ID NO: 75969 - RNA, 19 nt, Artificial Sequence
  Chemically synthesized
augagggucucuccaccau

SEQ ID NO: 75970 - RNA, 19 nt, Artificial Sequence
  Chemically synthesized
ucucuuacucucccuggaa

SEQ ID NO: 75971 - RNA, 19 nt, Artificial Sequence
  Chemically synthesized
aauaauuagguucuggcga

SEQ ID NO: 75972 - RNA, 19 nt, Artificial Sequence
  Chemically synthesized
cucaauuuucuggcaagga

SEQ ID NO: 75973 - RNA, 19 nt, Artificial Sequence
  Chemically synthesized
uguagagaccgcuaugcag

SEQ ID NO: 75974 - RNA, 19 nt, Artificial Sequence
  Chemically synthesized
uguuuucaucgucuucuuu

SEQ ID NO: 75975 - RNA, 19 nt, Artificial Sequence
  Chemically synthesized
gacaggccuccuaugaguu

SEQ ID NO: 75976 - RNA, 19 nt, Artificial Sequence
  Chemically synthesized
ucucuggcuuuagucuuga

SEQ ID NO: 75977 - RNA, 19 nt, Artificial Sequence
  Chemically synthesized
auucauaagaggaacaagu

SEQ ID NO: 75978 - RNA, 19 nt, Artificial Sequence
  Chemically synthesized
cuguuuauugacacguucu

SEQ ID NO: 75979 - RNA, 19 nt, Artificial Sequence
  Chemically synthesized
aaagaacuccaccaggaau

SEQ ID NO: 75980 - RNA, 19 nt, Artificial Sequence
  Chemically synthesized
uuacacugggacgaaaaua

SEQ ID NO: 75981 - RNA, 19 nt, Artificial Sequence
  Chemically synthesized
aaugagggucucuccacca

SEQ ID NO: 75982 - RNA, 19 nt, Artificial Sequence
  Chemically synthesized
agagcuuuugagugguuug

SEQ ID NO: 75983 - RNA, 19 nt, Artificial Sequence
  Chemically synthesized
gaauaauuagguucuggcg

SEQ ID NO: 75984 - RNA, 19 nt, Artificial Sequence
  Chemically synthesized
cuuuccaagcugggcaaca

SEQ ID NO: 75985 - RNA, 19 nt, Artificial Sequence
  Chemically synthesized
cuaacgacccaacauccag

SEQ ID NO: 75986 - RNA, 19 nt, Artificial Sequence
  Chemically synthesized
gaugugccacuuguauuca

SEQ ID NO: 75987 - RNA, 19 nt, Artificial Sequence
  Chemically synthesized
ucuccaccauauuaguacu

SEQ ID NO: 75988 - RNA, 19 nt, Artificial Sequence
  Chemically synthesized
aaacacggaugagugagca

SEQ ID NO: 75989 - RNA, 19 nt, Artificial Sequence
  Chemically synthesized
ugguacaaaugcagugagg

SEQ ID NO: 75990 - RNA, 19 nt, Artificial Sequence
  Chemically synthesized
uuggaacugcccugacaga

SEQ ID NO: 75991 - RNA, 19 nt, Artificial Sequence
  Chemically synthesized
aguugucauuaccaaggug

SEQ ID NO: 75992 - RNA, 19 nt, Artificial Sequence
  Chemically synthesized
aaguugucauuaccaaggu

SEQ ID NO: 75993 - RNA, 19 nt, Artificial Sequence
  Chemically synthesized
gauuuuaggcccugugguc

SEQ ID NO: 75994 - RNA, 19 nt, Artificial Sequence
  Chemically synthesized
accgcuaugcagaauggca

SEQ ID NO: 75995 - RNA, 19 nt, Artificial Sequence
  Chemically synthesized
uacucucauggcugggaau

SEQ ID NO: 75996 - RNA, 19 nt, Artificial Sequence
  Chemically synthesized
cugaagcugagcaaggugu

SEQ ID NO: 75997 - RNA, 19 nt, Artificial Sequence
  Chemically synthesized
uaucuucgcuggaguggca

SEQ ID NO: 75998 - RNA, 19 nt, Artificial Sequence
  Chemically synthesized
aaaagcguggcuuuaaaau

SEQ ID NO: 75999 - RNA, 19 nt, Artificial Sequence
  Chemically synthesized
uuaccaaggugguaagcca

SEQ ID NO: 76000 - RNA, 19 nt, Artificial Sequence
  Chemically synthesized
ugucauuaccaagguggua

SEQ ID NO: 76001 - RNA, 19 nt, Artificial Sequence
  Chemically synthesized
cuaugaguuguucugguac

SEQ ID NO: 76002 - RNA, 19 nt, Artificial Sequence
  Chemically synthesized
uaacgagagcuaccucaac

SEQ ID NO: 76003 - RNA, 19 nt, Artificial Sequence
  Chemically synthesized
cacaucguggcgcauuucu

SEQ ID NO: 76004 - RNA, 19 nt, Artificial Sequence
  Chemically synthesized
ugaagaggaggagucuuuc

SEQ ID NO: 76005 - RNA, 19 nt, Artificial Sequence
  Chemically synthesized
uacacuauaccauacuucc

SEQ ID NO: 76006 - RNA, 19 nt, Artificial Sequence
  Chemically synthesized
auuacaacaaggagagcuu

SEQ ID NO: 76007 - RNA, 19 nt, Artificial Sequence
  Chemically synthesized
cagauugccuacaaucacc

SEQ ID NO: 76008 - RNA, 19 nt, Artificial Sequence
  Chemically synthesized
gaacaaugaguucaagcag

SEQ ID NO: 76009 - RNA, 19 nt, Artificial Sequence
  Chemically synthesized
caggccuccuaugaguugu

SEQ ID NO: 76010 - RNA, 19 nt, Artificial Sequence
  Chemically synthesized
gaguucaucagacaggccu

SEQ ID NO: 76011 - RNA, 19 nt, Artificial Sequence
  Chemically synthesized
guucuacugguaugaagag

SEQ ID NO: 76012 - RNA, 19 nt, Artificial Sequence
  Chemically synthesized
aaguccaggcauuguguuu

SEQ ID NO: 76013 - RNA, 19 nt, Artificial Sequence
  Chemically synthesized
acaaggagagcuucuagac

SEQ ID NO: 76014 - RNA, 19 nt, Artificial Sequence
  Chemically synthesized
uagggaagcccuuacuaac

SEQ ID NO: 76015 - RNA, 19 nt, Artificial Sequence
  Chemically synthesized
agcaguauuggcguguucu

SEQ ID NO: 76016 - RNA, 19 nt, Artificial Sequence
  Chemically synthesized
ucuacuggauuugccggga

SEQ ID NO: 76017 - RNA, 19 nt, Artificial Sequence
  Chemically synthesized
uucgcugcucuucugaaau

SEQ ID NO: 76018 - RNA, 19 nt, Artificial Sequence
  Chemically synthesized
ugcuggauuuugaaugagg

SEQ ID NO: 76019 - RNA, 19 nt, Artificial Sequence
  Chemically synthesized
uggaacugcccugacagau

SEQ ID NO: 76020 - RNA, 19 nt, Artificial Sequence
  Chemically synthesized
uuaaaauggcgccagggca

SEQ ID NO: 76021 - RNA, 19 nt, Artificial Sequence
  Chemically synthesized
acagccgaagagcaacaag

SEQ ID NO: 76022 - RNA, 19 nt, Artificial Sequence
  Chemically synthesized
aauggauuuuaggcccugu

SEQ ID NO: 76023 - RNA, 19 nt, Artificial Sequence
  Chemically synthesized
uuuacuagggaagcccuua

SEQ ID NO: 76024 - RNA, 19 nt, Artificial Sequence
  Chemically synthesized
guucugguacacacaccau

SEQ ID NO: 76025 - RNA, 19 nt, Artificial Sequence
  Chemically synthesized
gaucaugaccucgucaacu

SEQ ID NO: 76026 - RNA, 19 nt, Artificial Sequence
  Chemically synthesized
cuugaucaugaccucguca

SEQ ID NO: 76027 - RNA, 19 nt, Artificial Sequence
  Chemically synthesized
cuuuagucuugaucaugac

SEQ ID NO: 76028 - RNA, 19 nt, Artificial Sequence
  Chemically synthesized
aaccuggaacgcuaccacu

SEQ ID NO: 76029 - RNA, 19 nt, Artificial Sequence
  Chemically synthesized
aacaaguauuugcugcaga

SEQ ID NO: 76030 - RNA, 19 nt, Artificial Sequence
  Chemically synthesized
agucuuuccauuacacacg

SEQ ID NO: 76031 - RNA, 19 nt, Artificial Sequence
  Chemically synthesized
acggccuguugauaugagc

SEQ ID NO: 76032 - RNA, 19 nt, Artificial Sequence
  Chemically synthesized
caguauuggcguguucuuc

SEQ ID NO: 76033 - RNA, 19 nt, Artificial Sequence
  Chemically synthesized
gauuacaggcuuaaagcag

SEQ ID NO: 76034 - RNA, 19 nt, Artificial Sequence
  Chemically synthesized
aauacugacgugauuacag

SEQ ID NO: 76035 - RNA, 19 nt, Artificial Sequence
  Chemically synthesized
uaugguacaaaugcaguga

SEQ ID NO: 76036 - RNA, 19 nt, Artificial Sequence
  Chemically synthesized
gucaacugaguucaucaga

SEQ ID NO: 76037 - RNA, 19 nt, Artificial Sequence
  Chemically synthesized
ucuggugaucucucuggcu

SEQ ID NO: 76038 - RNA, 19 nt, Artificial Sequence
  Chemically synthesized
aucguggcgcauuucuuca

SEQ ID NO: 76039 - RNA, 19 nt, Artificial Sequence
  Chemically synthesized
uuggguucaacacuggcuu

SEQ ID NO: 76040 - RNA, 19 nt, Artificial Sequence
  Chemically synthesized
guuauuuuggguucaacac

SEQ ID NO: 76041 - RNA, 19 nt, Artificial Sequence
  Chemically synthesized
caccaggaauuccugugac

SEQ ID NO: 76042 - RNA, 19 nt, Artificial Sequence
  Chemically synthesized
cacauagcuuuacacuggg

SEQ ID NO: 76043 - RNA, 19 nt, Artificial Sequence
  Chemically synthesized
cuucacauagcuuuacacu

SEQ ID NO: 76044 - RNA, 19 nt, Artificial Sequence
  Chemically synthesized
augaaaaagcguggcuuua

SEQ ID NO: 76045 - RNA, 19 nt, Artificial Sequence
  Chemically synthesized
uuguucgaggccaaaccca

SEQ ID NO: 76046 - RNA, 19 nt, Artificial Sequence
  Chemically synthesized
auugcuaaggacaauagca

SEQ ID NO: 76047 - RNA, 19 nt, Artificial Sequence
  Chemically synthesized
acauccagacacaggugag

SEQ ID NO: 76048 - RNA, 19 nt, Artificial Sequence
  Chemically synthesized
caacauccagacacaggug

SEQ ID NO: 76049 - RNA, 19 nt, Artificial Sequence
  Chemically synthesized
acgacccaacauccagaca

SEQ ID NO: 76050 - RNA, 19 nt, Artificial Sequence
  Chemically synthesized
uaugaagaggaggagucuu

SEQ ID NO: 76051 - RNA, 19 nt, Artificial Sequence
  Chemically synthesized
guuuauugacacguucuac

SEQ ID NO: 76052 - RNA, 19 nt, Artificial Sequence
  Chemically synthesized
guuauugauuccaaagaac

SEQ ID NO: 76053 - RNA, 19 nt, Artificial Sequence
  Chemically synthesized
acuuuggaggucaagucca

SEQ ID NO: 76054 - RNA, 19 nt, Artificial Sequence
  Chemically synthesized
aggacacuucaaaagaugu

SEQ ID NO: 76055 - RNA, 19 nt, Artificial Sequence
  Chemically synthesized
aaagcucucucgaggacac

SEQ ID NO: 76056 - RNA, 19 nt, Artificial Sequence
  Chemically synthesized
ggaaacacggaugagugag

SEQ ID NO: 76057 - RNA, 19 nt, Artificial Sequence
  Chemically synthesized
uggaguccuggaacuucac

SEQ ID NO: 76058 - RNA, 19 nt, Artificial Sequence
  Chemically synthesized
agaccgcuaugcagaaugg

SEQ ID NO: 76059 - RNA, 19 nt, Artificial Sequence
  Chemically synthesized
aauuagacaaaaaccucag

SEQ ID NO: 76060 - RNA, 19 nt, Artificial Sequence
  Chemically synthesized
aagaggaggagucuuucca

SEQ ID NO: 76061 - RNA, 19 nt, Artificial Sequence
  Chemically synthesized
aguacucucauggcuggga

SEQ ID NO: 76062 - RNA, 19 nt, Artificial Sequence
  Chemically synthesized
gaugaaaaucaggcucuuc

SEQ ID NO: 76063 - RNA, 19 nt, Artificial Sequence
  Chemically synthesized
aucauauauuucuuaccgg

SEQ ID NO: 76064 - RNA, 19 nt, Artificial Sequence
  Chemically synthesized
uugagugguuugcugaucu

SEQ ID NO: 76065 - RNA, 19 nt, Artificial Sequence
  Chemically synthesized
uauaugguacaaaugcagu

SEQ ID NO: 76066 - RNA, 19 nt, Artificial Sequence
  Chemically synthesized
cucucugcacaacaucacc

SEQ ID NO: 76067 - RNA, 19 nt, Artificial Sequence
  Chemically synthesized
gugccugaauuuuaacugc

SEQ ID NO: 76068 - RNA, 19 nt, Artificial Sequence
  Chemically synthesized
cuagacuuuggaggucaag

SEQ ID NO: 76069 - RNA, 19 nt, Artificial Sequence
  Chemically synthesized
uauuaguacucucauggcu

SEQ ID NO: 76070 - RNA, 19 nt, Artificial Sequence
  Chemically synthesized
agcucucucgaggacacuu

SEQ ID NO: 76071 - RNA, 19 nt, Artificial Sequence
  Chemically synthesized
uaaagcucucucgaggaca

SEQ ID NO: 76072 - RNA, 19 nt, Artificial Sequence
  Chemically synthesized
agcagaagaccuucuaugg

SEQ ID NO: 76073 - RNA, 19 nt, Artificial Sequence
  Chemically synthesized
gcugggaugaaaaucaggc

SEQ ID NO: 76074 - RNA, 19 nt, Artificial Sequence
  Chemically synthesized
ucugaaaucuauaugguac

SEQ ID NO: 76075 - RNA, 19 nt, Artificial Sequence
  Chemically synthesized
auuucacuacccagugugu

SEQ ID NO: 76076 - RNA, 19 nt, Artificial Sequence
  Chemically synthesized
accucgucaacugaguuca

SEQ ID NO: 76077 - RNA, 19 nt, Artificial Sequence
  Chemically synthesized
uuaacugcaugcuaauucu

SEQ ID NO: 76078 - RNA, 19 nt, Artificial Sequence
  Chemically synthesized
acugugccugaauuuuaac

SEQ ID NO: 76079 - RNA, 19 nt, Artificial Sequence
  Chemically synthesized
ugauaugagcucccaguug

SEQ ID NO: 76080 - RNA, 19 nt, Artificial Sequence
  Chemically synthesized
uugauaugagcucccaguu

SEQ ID NO: 76081 - RNA, 19 nt, Artificial Sequence
  Chemically synthesized
uugauuccaaagaacucca

SEQ ID NO: 76082 - RNA, 19 nt, Artificial Sequence
  Chemically synthesized
cuguggaccuaaagcucuc

SEQ ID NO: 76083 - RNA, 19 nt, Artificial Sequence
  Chemically synthesized
uacacugggacgaaaauac

SEQ ID NO: 76084 - RNA, 19 nt, Artificial Sequence
  Chemically synthesized
ucuucacauagcuuuacac

SEQ ID NO: 76085 - RNA, 19 nt, Artificial Sequence
  Chemically synthesized
gaaaacucacuuucugagu

SEQ ID NO: 76086 - RNA, 19 nt, Artificial Sequence
  Chemically synthesized
cuggaaacacggaugagug

SEQ ID NO: 76087 - RNA, 19 nt, Artificial Sequence
  Chemically synthesized
agcuuuugagugguuugcu

SEQ ID NO: 76088 - RNA, 19 nt, Artificial Sequence
  Chemically synthesized
agacuuuuucagcgugcac

SEQ ID NO: 76089 - RNA, 19 nt, Artificial Sequence
  Chemically synthesized
agggcaguacaucuuggug

SEQ ID NO: 76090 - RNA, 19 nt, Artificial Sequence
  Chemically synthesized
acuucacaugaaaaagcgu

SEQ ID NO: 76091 - RNA, 19 nt, Artificial Sequence
  Chemically synthesized
agacagucucucucugcac

SEQ ID NO: 76092 - RNA, 19 nt, Artificial Sequence
  Chemically synthesized
ugaguuguucugguacaca

SEQ ID NO: 76093 - RNA, 19 nt, Artificial Sequence
  Chemically synthesized
uauuuuggguucaacacug

SEQ ID NO: 76094 - RNA, 19 nt, Artificial Sequence
  Chemically synthesized
auugacacguucuacuggu

SEQ ID NO: 76095 - RNA, 19 nt, Artificial Sequence
  Chemically synthesized
auugugaacaguacacuau

SEQ ID NO: 76096 - RNA, 19 nt, Artificial Sequence
  Chemically synthesized
gaccuaaagcucucucgag

SEQ ID NO: 76097 - RNA, 19 nt, Artificial Sequence
  Chemically synthesized
gaaacacggaugagugagc

SEQ ID NO: 76098 - RNA, 19 nt, Artificial Sequence
  Chemically synthesized
cuuacucucccuggaaaca

SEQ ID NO: 76099 - RNA, 19 nt, Artificial Sequence
  Chemically synthesized
gcugaucucuuacucuccc

SEQ ID NO: 76100 - RNA, 19 nt, Artificial Sequence
  Chemically synthesized
guuugcugaucucuuacuc

SEQ ID NO: 76101 - RNA, 19 nt, Artificial Sequence
  Chemically synthesized
acugaagcugagcaaggug

SEQ ID NO: 76102 - RNA, 19 nt, Artificial Sequence
  Chemically synthesized
auguauuucacuacccagu

SEQ ID NO: 76103 - RNA, 19 nt, Artificial Sequence
  Chemically synthesized
gaaguugucauuaccaagg

SEQ ID NO: 76104 - RNA, 19 nt, Artificial Sequence
  Chemically synthesized
ucuuguaugcaugugaaag

SEQ ID NO: 76105 - RNA, 19 nt, Artificial Sequence
  Chemically synthesized
ucuuucucagccuggccau

SEQ ID NO: 76106 - RNA, 19 nt, Artificial Sequence
  Chemically synthesized
caucgucuucuuucucagc

SEQ ID NO: 76107 - RNA, 19 nt, Artificial Sequence
  Chemically synthesized
uuuucaucgucuucuuucu

SEQ ID NO: 76108 - RNA, 19 nt, Artificial Sequence
  Chemically synthesized
aacugaguucaucagacag

SEQ ID NO: 76109 - RNA, 19 nt, Artificial Sequence
  Chemically synthesized
acccaacauccagacacag

SEQ ID NO: 76110 - RNA, 19 nt, Artificial Sequence
  Chemically synthesized
uuauuuuggguucaacacu

SEQ ID NO: 76111 - RNA, 19 nt, Artificial Sequence
  Chemically synthesized
ugugccacuuguauucauc

SEQ ID NO: 76112 - RNA, 19 nt, Artificial Sequence
  Chemically synthesized
aaaauacugacgugauuac

SEQ ID NO: 76113 - RNA, 19 nt, Artificial Sequence
  Chemically synthesized
uugaaugagggucucucca

SEQ ID NO: 76114 - RNA, 19 nt, Artificial Sequence
  Chemically synthesized
uucuggcgauuucaacaag

SEQ ID NO: 76115 - RNA, 19 nt, Artificial Sequence
  Chemically synthesized
uucuguagagaccgcuaug

SEQ ID NO: 76116 - RNA, 19 nt, Artificial Sequence
  Chemically synthesized
cauguuuucaucgucuucu

SEQ ID NO: 76117 - RNA, 19 nt, Artificial Sequence
  Chemically synthesized
acacaaccacugaauugcu

SEQ ID NO: 76118 - RNA, 19 nt, Artificial Sequence
  Chemically synthesized
cuucaaccuggaacgcuac

SEQ ID NO: 76119 - RNA, 19 nt, Artificial Sequence
  Chemically synthesized
aaaaaccucagauuucaca

SEQ ID NO: 76120 - RNA, 19 nt, Artificial Sequence
  Chemically synthesized
aauucuaauaccugucagu

SEQ ID NO: 76121 - RNA, 19 nt, Artificial Sequence
  Chemically synthesized
uggguucaacacuggcuug

SEQ ID NO: 76122 - RNA, 19 nt, Artificial Sequence
  Chemically synthesized
ucuuuccauuacacacgag

SEQ ID NO: 76123 - RNA, 19 nt, Artificial Sequence
  Chemically synthesized
uagacuuuggaggucaagu

SEQ ID NO: 76124 - RNA, 19 nt, Artificial Sequence
  Chemically synthesized
uacuagggaagcccuuacu

SEQ ID NO: 76125 - RNA, 19 nt, Artificial Sequence
  Chemically synthesized
uugucauuaccaagguggu

SEQ ID NO: 76126 - RNA, 19 nt, Artificial Sequence
  Chemically synthesized
caaacccaagacagucucu

SEQ ID NO: 76127 - RNA, 19 nt, Artificial Sequence
  Chemically synthesized
ucuugaucaugaccucguc

SEQ ID NO: 76128 - RNA, 19 nt, Artificial Sequence
  Chemically synthesized
ucucucuggcuuuagucuu

SEQ ID NO: 76129 - RNA, 19 nt, Artificial Sequence
  Chemically synthesized
gaucucucuggcuuuaguc

SEQ ID NO: 76130 - RNA, 19 nt, Artificial Sequence
  Chemically synthesized
cauuucuucaaccuggaac

SEQ ID NO: 76131 - RNA, 19 nt, Artificial Sequence
  Chemically synthesized
augcaaccauccacaucgu

SEQ ID NO: 76132 - RNA, 19 nt, Artificial Sequence
  Chemically synthesized
caaguauuugcugcagagg

SEQ ID NO: 76133 - RNA, 19 nt, Artificial Sequence
  Chemically synthesized
uucauucauaagaggaaca

SEQ ID NO: 76134 - RNA, 19 nt, Artificial Sequence
  Chemically synthesized
uucaacacuggcuugggca

SEQ ID NO: 76135 - RNA, 19 nt, Artificial Sequence
  Chemically synthesized
guucaagcagauugccuac

SEQ ID NO: 76136 - RNA, 19 nt, Artificial Sequence
  Chemically synthesized
gaguucaagcagauugccu

SEQ ID NO: 76137 - RNA, 19 nt, Artificial Sequence
  Chemically synthesized
uucuuaccggcugggauga

SEQ ID NO: 76138 - RNA, 19 nt, Artificial Sequence
  Chemically synthesized
ucucccuggaaacacggau

SEQ ID NO: 76139 - RNA, 19 nt, Artificial Sequence
  Chemically synthesized
uacuggauuugccgggaug

SEQ ID NO: 76140 - RNA, 19 nt, Artificial Sequence
  Chemically synthesized
agugcccagccauaucuuc

SEQ ID NO: 76141 - RNA, 19 nt, Artificial Sequence
  Chemically synthesized
cguggcuuuaaaauggcgc

SEQ ID NO: 76142 - RNA, 19 nt, Artificial Sequence
  Chemically synthesized
gauuucaacaagaaguugu

SEQ ID NO: 76143 - RNA, 19 nt, Artificial Sequence
  Chemically synthesized
augcagaauggcagacagu

SEQ ID NO: 76144 - RNA, 19 nt, Artificial Sequence
  Chemically synthesized
aacccaagacagucucucu

SEQ ID NO: 76145 - RNA, 19 nt, Artificial Sequence
  Chemically synthesized
gauuguucgaggccaaacc

SEQ ID NO: 76146 - RNA, 19 nt, Artificial Sequence
  Chemically synthesized
guacacacaccauguuuuc

SEQ ID NO: 76147 - RNA, 19 nt, Artificial Sequence
  Chemically synthesized
guuguucugguacacacac

SEQ ID NO: 76148 - RNA, 19 nt, Artificial Sequence
  Chemically synthesized
augaccucgucaacugagu

SEQ ID NO: 76149 - RNA, 19 nt, Artificial Sequence
  Chemically synthesized
ugcuaaggacaauagcagg

SEQ ID NO: 76150 - RNA, 19 nt, Artificial Sequence
  Chemically synthesized
gaggaacaaguauuugcug

SEQ ID NO: 76151 - RNA, 19 nt, Artificial Sequence
  Chemically synthesized
auuccaaagaacuccacca

SEQ ID NO: 76152 - RNA, 19 nt, Artificial Sequence
  Chemically synthesized
uauuggcguguucuucugu

SEQ ID NO: 76153 - RNA, 19 nt, Artificial Sequence
  Chemically synthesized
cauagcuuuacacugggac

SEQ ID NO: 76154 - RNA, 19 nt, Artificial Sequence
  Chemically synthesized
ugaaugagggucucuccac

SEQ ID NO: 76155 - RNA, 19 nt, Artificial Sequence
  Chemically synthesized
aagcugagcaagguguauu

SEQ ID NO: 76156 - RNA, 19 nt, Artificial Sequence
  Chemically synthesized
cuuuaaaauggcgccaggg

SEQ ID NO: 76157 - RNA, 19 nt, Artificial Sequence
  Chemically synthesized
aagagcaacaaguaucaug

SEQ ID NO: 76158 - RNA, 19 nt, Artificial Sequence
  Chemically synthesized
auuagguucuggcgauuuc

SEQ ID NO: 76159 - RNA, 19 nt, Artificial Sequence
  Chemically synthesized
agaauaauuagguucuggc

SEQ ID NO: 76160 - RNA, 19 nt, Artificial Sequence
  Chemically synthesized
uuuauugacacguucuacu

SEQ ID NO: 76161 - RNA, 19 nt, Artificial Sequence
  Chemically synthesized
accaggaauuccugugacg

SEQ ID NO: 76162 - RNA, 19 nt, Artificial Sequence
  Chemically synthesized
uucuaugggaggcccaacu

SEQ ID NO: 76163 - RNA, 19 nt, Artificial Sequence
  Chemically synthesized
uauuucuuaccggcuggga

SEQ ID NO: 76164 - RNA, 19 nt, Artificial Sequence
  Chemically synthesized
uuugcugaucucuuacucu

SEQ ID NO: 76165 - RNA, 19 nt, Artificial Sequence
  Chemically synthesized
ugguuugcugaucucuuac

SEQ ID NO: 76166 - RNA, 19 nt, Artificial Sequence
  Chemically synthesized
cacuacccagugugugugu

SEQ ID NO: 76167 - RNA, 19 nt, Artificial Sequence
  Chemically synthesized
caggaagacuuuuucagcg

SEQ ID NO: 76168 - RNA, 19 nt, Artificial Sequence
  Chemically synthesized
agcguggcuuuaaaauggc

SEQ ID NO: 76169 - RNA, 19 nt, Artificial Sequence
  Chemically synthesized
agaaauuuccugacagccg

SEQ ID NO: 76170 - RNA, 19 nt, Artificial Sequence
  Chemically synthesized
augaguuguucugguacac

SEQ ID NO: 76171 - RNA, 19 nt, Artificial Sequence
  Chemically synthesized
uagucuugaucaugaccuc

SEQ ID NO: 76172 - RNA, 19 nt, Artificial Sequence
  Chemically synthesized
uuaaugcaaccauccacau

SEQ ID NO: 76173 - RNA, 19 nt, Artificial Sequence
  Chemically synthesized
aacauccagacacagguga

SEQ ID NO: 76174 - RNA, 19 nt, Artificial Sequence
  Chemically synthesized
gauagcuguuaaugcaacc

SEQ ID NO: 76175 - RNA, 19 nt, Artificial Sequence
  Chemically synthesized
aauuuacuagggaagcccu

SEQ ID NO: 76176 - RNA, 19 nt, Artificial Sequence
  Chemically synthesized
acacacgaguuauuuuggg

SEQ ID NO: 76177 - RNA, 19 nt, Artificial Sequence
  Chemically synthesized
gauaugagcucccaguugg

SEQ ID NO: 76178 - RNA, 19 nt, Artificial Sequence
  Chemically synthesized
uacaacaaggagagcuucu

SEQ ID NO: 76179 - RNA, 19 nt, Artificial Sequence
  Chemically synthesized
gcagaagaccuucuauggg

SEQ ID NO: 76180 - RNA, 19 nt, Artificial Sequence
  Chemically synthesized
aagcagaagaccuucuaug

SEQ ID NO: 76181 - RNA, 19 nt, Artificial Sequence
  Chemically synthesized
aacacggaugagugagcag

SEQ ID NO: 76182 - RNA, 19 nt, Artificial Sequence
  Chemically synthesized
auaugguacaaaugcagug

SEQ ID NO: 76183 - RNA, 19 nt, Artificial Sequence
  Chemically synthesized
uucacuacccagugugugu

SEQ ID NO: 76184 - RNA, 19 nt, Artificial Sequence
  Chemically synthesized
cucuggaguccuggaacuu

SEQ ID NO: 76185 - RNA, 19 nt, Artificial Sequence
  Chemically synthesized
uuucaacaagaaguuguca

SEQ ID NO: 76186 - RNA, 19 nt, Artificial Sequence
  Chemically synthesized
uuuccugacagccgaagag

SEQ ID NO: 76187 - RNA, 19 nt, Artificial Sequence
  Chemically synthesized
ccgugccucaauuuucugg

SEQ ID NO: 76188 - RNA, 19 nt, Artificial Sequence
  Chemically synthesized
agggagaagaaauuuccug

SEQ ID NO: 76189 - RNA, 19 nt, Artificial Sequence
  Chemically synthesized
caugaccucgucaacugag

SEQ ID NO: 76190 - RNA, 19 nt, Artificial Sequence
  Chemically synthesized
gugagggagaagaaauuuc

SEQ ID NO: 76191 - RNA, 19 nt, Artificial Sequence
  Chemically synthesized
auuuacuagggaagcccuu

SEQ ID NO: 76192 - RNA, 19 nt, Artificial Sequence
  Chemically synthesized
uguuaaugcaaccauccac

SEQ ID NO: 76193 - RNA, 19 nt, Artificial Sequence
  Chemically synthesized
uuucauucauaagaggaac

SEQ ID NO: 76194 - RNA, 19 nt, Artificial Sequence
  Chemically synthesized
aggucaaguccaggcauug

SEQ ID NO: 76195 - RNA, 19 nt, Artificial Sequence
  Chemically synthesized
cauauuaguacucucaugg

SEQ ID NO: 76196 - RNA, 19 nt, Artificial Sequence
  Chemically synthesized
gaucucuuacucucccugg

SEQ ID NO: 76197 - RNA, 19 nt, Artificial Sequence
  Chemically synthesized
ugcugaucucuuacucucc

SEQ ID NO: 76198 - RNA, 19 nt, Artificial Sequence
  Chemically synthesized
gcugagcaagguguauuuc

SEQ ID NO: 76199 - RNA, 19 nt, Artificial Sequence
  Chemically synthesized
aacaucaccuucuguagag

SEQ ID NO: 76200 - RNA, 19 nt, Artificial Sequence
  Chemically synthesized
uucgaggccaaacccaaga

SEQ ID NO: 76201 - RNA, 19 nt, Artificial Sequence
  Chemically synthesized
aguucaucagacaggccuc

SEQ ID NO: 76202 - RNA, 19 nt, Artificial Sequence
  Chemically synthesized
cagauuucacaaacugguc

SEQ ID NO: 76203 - RNA, 19 nt, Artificial Sequence
  Chemically synthesized
cucagauuucacaaacugg

SEQ ID NO: 76204 - RNA, 19 nt, Artificial Sequence
  Chemically synthesized
aaccucagauuucacaaac

SEQ ID NO: 76205 - RNA, 19 nt, Artificial Sequence
  Chemically synthesized
ccuguugauaugagcuccc

SEQ ID NO: 76206 - RNA, 19 nt, Artificial Sequence
  Chemically synthesized
acuccaccaggaauuccug

SEQ ID NO: 76207 - RNA, 19 nt, Artificial Sequence
  Chemically synthesized
aagaacuccaccaggaauu

SEQ ID NO: 76208 - RNA, 19 nt, Artificial Sequence
  Chemically synthesized
ucucuccaccauauuagua

SEQ ID NO: 76209 - RNA, 19 nt, Artificial Sequence
  Chemically synthesized
gugauuacaggcuuaaagc

SEQ ID NO: 76210 - RNA, 19 nt, Artificial Sequence
  Chemically synthesized
gauuuugaaugagggucuc

SEQ ID NO: 76211 - RNA, 19 nt, Artificial Sequence
  Chemically synthesized
aauuagguucuggcgauuu

SEQ ID NO: 76212 - RNA, 19 nt, Artificial Sequence
  Chemically synthesized
cugaguucaucagacaggc

SEQ ID NO: 76213 - RNA, 19 nt, Artificial Sequence
  Chemically synthesized
aggcaauuagacaaaaacc

SEQ ID NO: 76214 - RNA, 19 nt, Artificial Sequence
  Chemically synthesized
auccgcacugugccugaau

SEQ ID NO: 76215 - RNA, 19 nt, Artificial Sequence
  Chemically synthesized
augucauauacaacagaac

SEQ ID NO: 76216 - RNA, 19 nt, Artificial Sequence
  Chemically synthesized
cuauuacaacaaggagagc

SEQ ID NO: 76217 - RNA, 19 nt, Artificial Sequence
  Chemically synthesized
acuucaaaagaugugccac

SEQ ID NO: 76218 - RNA, 19 nt, Artificial Sequence
  Chemically synthesized
aagcucucucgaggacacu

SEQ ID NO: 76219 - RNA, 19 nt, Artificial Sequence
  Chemically synthesized
cuucuguggaccuaaagcu

SEQ ID NO: 76220 - RNA, 19 nt, Artificial Sequence
  Chemically synthesized
caacuggaacaaugaguuc

SEQ ID NO: 76221 - RNA, 19 nt, Artificial Sequence
  Chemically synthesized
auauauuucuuaccggcug

SEQ ID NO: 76222 - RNA, 19 nt, Artificial Sequence
  Chemically synthesized
aaugcagugaggcacagac

SEQ ID NO: 76223 - RNA, 19 nt, Artificial Sequence
  Chemically synthesized
ucuucugaaaucuauaugg

SEQ ID NO: 76224 - RNA, 19 nt, Artificial Sequence
  Chemically synthesized
aagcguggcuuuaaaaugg

SEQ ID NO: 76225 - RNA, 19 nt, Artificial Sequence
  Chemically synthesized
aucucucuggcuuuagucu

SEQ ID NO: 76226 - RNA, 19 nt, Artificial Sequence
  Chemically synthesized
gugaucucucuggcuuuag

SEQ ID NO: 76227 - RNA, 19 nt, Artificial Sequence
  Chemically synthesized
guauuugcugcagaggacc

SEQ ID NO: 76228 - RNA, 19 nt, Artificial Sequence
  Chemically synthesized
aagaggaacaaguauuugc

SEQ ID NO: 76229 - RNA, 19 nt, Artificial Sequence
  Chemically synthesized
cugaauuuuaacugcaugc

SEQ ID NO: 76230 - RNA, 19 nt, Artificial Sequence
  Chemically synthesized
auuuuggguucaacacugg

SEQ ID NO: 76231 - RNA, 19 nt, Artificial Sequence
  Chemically synthesized
acucucauggcugggaaua

SEQ ID NO: 76232 - RNA, 19 nt, Artificial Sequence
  Chemically synthesized
uacucucccuggaaacacg

SEQ ID NO: 76233 - RNA, 19 nt, Artificial Sequence
  Chemically synthesized
aguccuggaacuucacaug

SEQ ID NO: 76234 - RNA, 19 nt, Artificial Sequence
  Chemically synthesized
auuucaacaagaaguuguc

SEQ ID NO: 76235 - RNA, 19 nt, Artificial Sequence
  Chemically synthesized
ucugcacaacaucaccuuc

SEQ ID NO: 76236 - RNA, 19 nt, Artificial Sequence
  Chemically synthesized
ucucucugcacaacaucac

SEQ ID NO: 76237 - RNA, 19 nt, Artificial Sequence
  Chemically synthesized
uuuccaagcugggcaacac

SEQ ID NO: 76238 - RNA, 19 nt, Artificial Sequence
  Chemically synthesized
gcuguuaaugcaaccaucc

SEQ ID NO: 76239 - RNA, 19 nt, Artificial Sequence
  Chemically synthesized
auaugagcucccaguuggg

SEQ ID NO: 76240 - RNA, 19 nt, Artificial Sequence
  Chemically synthesized
cuccaccaggaauuccugu

SEQ ID NO: 76241 - RNA, 19 nt, Artificial Sequence
  Chemically synthesized
uuaguacucucauggcugg

SEQ ID NO: 76242 - RNA, 19 nt, Artificial Sequence
  Chemically synthesized
accuaaagcucucucgagg

SEQ ID NO: 76243 - RNA, 19 nt, Artificial Sequence
  Chemically synthesized
augguacaaaugcagugag

SEQ ID NO: 76244 - RNA, 19 nt, Artificial Sequence
  Chemically synthesized
ucuucuuucucagccuggc

SEQ ID NO: 76245 - RNA, 19 nt, Artificial Sequence
  Chemically synthesized
aauuccugugacggccugu

SEQ ID NO: 76246 - RNA, 19 nt, Artificial Sequence
  Chemically synthesized
aggcauuguguuuucaauc

SEQ ID NO: 76247 - RNA, 19 nt, Artificial Sequence
  Chemically synthesized
cuuguauucaucagcugac

SEQ ID NO: 76248 - RNA, 19 nt, Artificial Sequence
  Chemically synthesized
aacuggaacaaugaguuca

SEQ ID NO: 76249 - RNA, 19 nt, Artificial Sequence
  Chemically synthesized
uauauuucuuaccggcugg

SEQ ID NO: 76250 - RNA, 19 nt, Artificial Sequence
  Chemically synthesized
uuuggaacugcccugacag

SEQ ID NO: 76251 - RNA, 19 nt, Artificial Sequence
  Chemically synthesized
cuuuuucagcgugcacauc

SEQ ID NO: 76252 - RNA, 19 nt, Artificial Sequence
  Chemically synthesized
aaagcguggcuuuaaaaug

SEQ ID NO: 76253 - RNA, 19 nt, Artificial Sequence
  Chemically synthesized
aaauggauuuuaggcccug

SEQ ID NO: 76254 - RNA, 19 nt, Artificial Sequence
  Chemically synthesized
ucucucucugcacaacauc

SEQ ID NO: 76255 - RNA, 19 nt, Artificial Sequence
  Chemically synthesized
uucugguacacacaccaug

SEQ ID NO: 76256 - RNA, 19 nt, Artificial Sequence
  Chemically synthesized
aauugcuaaggacaauagc

SEQ ID NO: 76257 - RNA, 19 nt, Artificial Sequence
  Chemically synthesized
auuucuucaaccuggaacg

SEQ ID NO: 76258 - RNA, 19 nt, Artificial Sequence
  Chemically synthesized
gaagaggaggagucuuucc

SEQ ID NO: 76259 - RNA, 19 nt, Artificial Sequence
  Chemically synthesized
uaugagcucccaguuggga

SEQ ID NO: 76260 - RNA, 19 nt, Artificial Sequence
  Chemically synthesized
agggaagcccuuacuaacg

SEQ ID NO: 76261 - RNA, 19 nt, Artificial Sequence
  Chemically synthesized
auuggcguguucuucugug

SEQ ID NO: 76262 - RNA, 19 nt, Artificial Sequence
  Chemically synthesized
ucuuacucucccuggaaac

SEQ ID NO: 76263 - RNA, 19 nt, Artificial Sequence
  Chemically synthesized
gagcuuuugagugguuugc

SEQ ID NO: 76264 - RNA, 19 nt, Artificial Sequence
  Chemically synthesized
gguacaaaugcagugaggc

SEQ ID NO: 76265 - RNA, 19 nt, Artificial Sequence
  Chemically synthesized
aagaauaauuagguucugg

SEQ ID NO: 76266 - RNA, 19 nt, Artificial Sequence
  Chemically synthesized
ucucugcacaacaucaccu

SEQ ID NO: 76267 - RNA, 19 nt, Artificial Sequence
  Chemically synthesized
acaggccuccuaugaguug

SEQ ID NO: 76268 - RNA, 19 nt, Artificial Sequence
  Chemically synthesized
augcuaauucuaauaccug

SEQ ID NO: 76269 - RNA, 19 nt, Artificial Sequence
  Chemically synthesized
uuuggguucaacacuggcu

SEQ ID NO: 76270 - RNA, 19 nt, Artificial Sequence
  Chemically synthesized
uauugacacguucuacugg

SEQ ID NO: 76271 - RNA, 19 nt, Artificial Sequence
  Chemically synthesized
aacuccaccaggaauuccu

SEQ ID NO: 76272 - RNA, 19 nt, Artificial Sequence
  Chemically synthesized
uauugauuccaaagaacuc

SEQ ID NO: 76273 - RNA, 19 nt, Artificial Sequence
  Chemically synthesized
auuaguacucucauggcug

SEQ ID NO: 76274 - RNA, 19 nt, Artificial Sequence
  Chemically synthesized
ucuguggaccuaaagcucu

SEQ ID NO: 76275 - RNA, 19 nt, Artificial Sequence
  Chemically synthesized
uuggcguguucuucugugg

SEQ ID NO: 76276 - RNA, 19 nt, Artificial Sequence
  Chemically synthesized
auacugacgugauuacagg

SEQ ID NO: 76277 - RNA, 19 nt, Artificial Sequence
  Chemically synthesized
uagcuuuacacugggacga

SEQ ID NO: 76278 - RNA, 19 nt, Artificial Sequence
  Chemically synthesized
aucaggcucuucacauagc

SEQ ID NO: 76279 - RNA, 19 nt, Artificial Sequence
  Chemically synthesized
uuucuuaccggcugggaug

SEQ ID NO: 76280 - RNA, 19 nt, Artificial Sequence
  Chemically synthesized
uuacuagggaagcccuuac

SEQ ID NO: 76281 - RNA, 19 nt, Artificial Sequence
  Chemically synthesized
uucaucgucuucuuucuca

SEQ ID NO: 76282 - RNA, 19 nt, Artificial Sequence
  Chemically synthesized
guuuucaucgucuucuuuc

SEQ ID NO: 76283 - RNA, 19 nt, Artificial Sequence
  Chemically synthesized
uacacacaccauguuuuca

SEQ ID NO: 76284 - RNA, 19 nt, Artificial Sequence
  Chemically synthesized
gauuucacaaacuggucgc

SEQ ID NO: 76285 - RNA, 19 nt, Artificial Sequence
  Chemically synthesized
auuccugugacggccuguu

SEQ ID NO: 76286 - RNA, 19 nt, Artificial Sequence
  Chemically synthesized
uuccaaagaacuccaccag

SEQ ID NO: 76287 - RNA, 19 nt, Artificial Sequence
  Chemically synthesized
uggaacaaugaguucaagc

SEQ ID NO: 76288 - RNA, 19 nt, Artificial Sequence
  Chemically synthesized
auagcuuuacacugggacg

SEQ ID NO: 76289 - RNA, 19 nt, Artificial Sequence
  Chemically synthesized
acugcccugacagauguau

SEQ ID NO: 76290 - RNA, 19 nt, Artificial Sequence
  Chemically synthesized
ucuaauugccuccuccacg

SEQ ID NO: 76291 - RNA, 19 nt, Artificial Sequence
  Chemically synthesized
ugugaagagccugauuuuc

SEQ ID NO: 76292 - RNA, 19 nt, Artificial Sequence
  Chemically synthesized
augugaagagccugauuuu

SEQ ID NO: 76293 - RNA, 19 nt, Artificial Sequence
  Chemically synthesized
ucuucauaccaguagaacg

SEQ ID NO: 76294 - RNA, 19 nt, Artificial Sequence
  Chemically synthesized
uguugaaaucgccagaacc

SEQ ID NO: 76295 - RNA, 19 nt, Artificial Sequence
  Chemically synthesized
uuuucgucccaguguaaag

SEQ ID NO: 76296 - RNA, 19 nt, Artificial Sequence
  Chemically synthesized
uguccuuagcaauucagug

SEQ ID NO: 76297 - RNA, 19 nt, Artificial Sequence
  Chemically synthesized
uacaaguggcacaucuuuu

SEQ ID NO: 76298 - RNA, 19 nt, Artificial Sequence
  Chemically synthesized
aauuucuucucccucaccu

SEQ ID NO: 76299 - RNA, 19 nt, Artificial Sequence
  Chemically synthesized
uguugggucguuaguaagg

SEQ ID NO: 76300 - RNA, 19 nt, Artificial Sequence
  Chemically synthesized
ucuugcaucccggcaaauc

SEQ ID NO: 76301 - RNA, 19 nt, Artificial Sequence
  Chemically synthesized
uguugaacccaaaauaacu

SEQ ID NO: 76302 - RNA, 19 nt, Artificial Sequence
  Chemically synthesized
uuuugaaguguccucgaga

SEQ ID NO: 76303 - RNA, 19 nt, Artificial Sequence
  Chemically synthesized
uuggguuuggccucgaaca

SEQ ID NO: 76304 - RNA, 19 nt, Artificial Sequence
  Chemically synthesized
guguguaauggaaagacuc

SEQ ID NO: 76305 - RNA, 19 nt, Artificial Sequence
  Chemically synthesized
uuuuaaagccacgcuuuuu

SEQ ID NO: 76306 - RNA, 19 nt, Artificial Sequence
  Chemically synthesized
uucugcauagcggucucua

SEQ ID NO: 76307 - RNA, 19 nt, Artificial Sequence
  Chemically synthesized
uguguguaccagaacaacu

SEQ ID NO: 76308 - RNA, 19 nt, Artificial Sequence
  Chemically synthesized
uuagguccacagaagaaca

SEQ ID NO: 76309 - RNA, 19 nt, Artificial Sequence
  Chemically synthesized
ugucagggcaguuccaaag

SEQ ID NO: 76310 - RNA, 19 nt, Artificial Sequence
  Chemically synthesized
uucggcugucaggaaauuu

SEQ ID NO: 76311 - RNA, 19 nt, Artificial Sequence
  Chemically synthesized
uaucccauaggcgaccagu

SEQ ID NO: 76312 - RNA, 19 nt, Artificial Sequence
  Chemically synthesized
ugucuaauugccuccucca

SEQ ID NO: 76313 - RNA, 19 nt, Artificial Sequence
  Chemically synthesized
uaucaacaggccgucacag

SEQ ID NO: 76314 - RNA, 19 nt, Artificial Sequence
  Chemically synthesized
uugaaaucgccagaaccua

SEQ ID NO: 76315 - RNA, 19 nt, Artificial Sequence
  Chemically synthesized
uauaguguacuguucacaa

SEQ ID NO: 76316 - RNA, 19 nt, Artificial Sequence
  Chemically synthesized
uuagaauuagcaugcaguu

SEQ ID NO: 76317 - RNA, 19 nt, Artificial Sequence
  Chemically synthesized
uaguguacuguucacaaua

SEQ ID NO: 76318 - RNA, 19 nt, Artificial Sequence
  Chemically synthesized
uccugguggaguucuuugg

SEQ ID NO: 76319 - RNA, 19 nt, Artificial Sequence
  Chemically synthesized
ucuccuuguuguaauagaa

SEQ ID NO: 76320 - RNA, 19 nt, Artificial Sequence
  Chemically synthesized
ugcauagcggucucuacag

SEQ ID NO: 76321 - RNA, 19 nt, Artificial Sequence
  Chemically synthesized
aaauuuauucccagccaug

SEQ ID NO: 76322 - RNA, 19 nt, Artificial Sequence
  Chemically synthesized
uccucgagagagcuuuagg

SEQ ID NO: 76323 - RNA, 19 nt, Artificial Sequence
  Chemically synthesized
ucugcuugaacucauuguu

SEQ ID NO: 76324 - RNA, 19 nt, Artificial Sequence
  Chemically synthesized
ugcauuuguaccauauaga

SEQ ID NO: 76325 - RNA, 19 nt, Artificial Sequence
  Chemically synthesized
ugaugaacucaguugacga

SEQ ID NO: 76326 - RNA, 19 nt, Artificial Sequence
  Chemically synthesized
guuccuugccagaaaauug

SEQ ID NO: 76327 - RNA, 19 nt, Artificial Sequence
  Chemically synthesized
ucaguugacgaggucauga

SEQ ID NO: 76328 - RNA, 19 nt, Artificial Sequence
  Chemically synthesized
uauucaccaguucccaacu

SEQ ID NO: 76329 - RNA, 19 nt, Artificial Sequence
  Chemically synthesized
ccuuguuguaauagaaaug

SEQ ID NO: 76330 - RNA, 19 nt, Artificial Sequence
  Chemically synthesized
acuaauaugguggagagac

SEQ ID NO: 76331 - RNA, 19 nt, Artificial Sequence
  Chemically synthesized
uuucaucccagccgguaag

SEQ ID NO: 76332 - RNA, 19 nt, Artificial Sequence
  Chemically synthesized
ugauguugugcagagagag

SEQ ID NO: 76333 - RNA, 19 nt, Artificial Sequence
  Chemically synthesized
ugaucaagacuaaagccag

SEQ ID NO: 76334 - RNA, 19 nt, Artificial Sequence
  Chemically synthesized
uaggcaaucugcuugaacu

SEQ ID NO: 76335 - RNA, 19 nt, Artificial Sequence
  Chemically synthesized
ucugcuuuaagccuguaau

SEQ ID NO: 76336 - RNA, 19 nt, Artificial Sequence
  Chemically synthesized
aagauauggcugggcacug

SEQ ID NO: 76337 - RNA, 19 nt, Artificial Sequence
  Chemically synthesized
cuugguaaugacaacuucu

SEQ ID NO: 76338 - RNA, 19 nt, Artificial Sequence
  Chemically synthesized
uuguccuuagcaauucagu

SEQ ID NO: 76339 - RNA, 19 nt, Artificial Sequence
  Chemically synthesized
ugaaauaagguuucgacug

SEQ ID NO: 76340 - RNA, 19 nt, Artificial Sequence
  Chemically synthesized
aggaaguaugguauagugu

SEQ ID NO: 76341 - RNA, 19 nt, Artificial Sequence
  Chemically synthesized
ugaugaauacaaguggcac

SEQ ID NO: 76342 - RNA, 19 nt, Artificial Sequence
  Chemically synthesized
agccgguaagaaauauaug

SEQ ID NO: 76343 - RNA, 19 nt, Artificial Sequence
  Chemically synthesized
acucaaaagcucuugcauc

SEQ ID NO: 76344 - RNA, 19 nt, Artificial Sequence
  Chemically synthesized
agucuagaagcucuccuug

SEQ ID NO: 76345 - RNA, 19 nt, Artificial Sequence
  Chemically synthesized
ucaguauuuucgucccagu

SEQ ID NO: 76346 - RNA, 19 nt, Artificial Sequence
  Chemically synthesized
ucagcaaaccacucaaaag

SEQ ID NO: 76347 - RNA, 19 nt, Artificial Sequence
  Chemically synthesized
uugcaucccggcaaaucca

SEQ ID NO: 76348 - RNA, 19 nt, Artificial Sequence
  Chemically synthesized
cccucauucaaaauccagc

SEQ ID NO: 76349 - RNA, 19 nt, Artificial Sequence
  Chemically synthesized
uguggaugguugcauuaac

SEQ ID NO: 76350 - RNA, 19 nt, Artificial Sequence
  Chemically synthesized
auguugggucguuaguaag

SEQ ID NO: 76351 - RNA, 19 nt, Artificial Sequence
  Chemically synthesized
ucuuuugaaguguccucga

SEQ ID NO: 76352 - RNA, 19 nt, Artificial Sequence
  Chemically synthesized
ccugauuuucaucccagcc

SEQ ID NO: 76353 - RNA, 19 nt, Artificial Sequence
  Chemically synthesized
uaguaagggcuucccuagu

SEQ ID NO: 76354 - RNA, 19 nt, Artificial Sequence
  Chemically synthesized
uggaugguugcauuaacag

SEQ ID NO: 76355 - RNA, 19 nt, Artificial Sequence
  Chemically synthesized
cuuguuccucuuaugaaug

SEQ ID NO: 76356 - RNA, 19 nt, Artificial Sequence
  Chemically synthesized
gugaagagccugauuuuca

SEQ ID NO: 76357 - RNA, 19 nt, Artificial Sequence
  Chemically synthesized
uuuucaucccagccgguaa

SEQ ID NO: 76358 - RNA, 19 nt, Artificial Sequence
  Chemically synthesized
uccagcgaagauauggcug

SEQ ID NO: 76359 - RNA, 19 nt, Artificial Sequence
  Chemically synthesized
uccucugcagcaaauacuu

SEQ ID NO: 76360 - RNA, 19 nt, Artificial Sequence
  Chemically synthesized
uccuccucuucauaccagu

SEQ ID NO: 76361 - RNA, 19 nt, Artificial Sequence
  Chemically synthesized
aguauuuucgucccagugu

SEQ ID NO: 76362 - RNA, 19 nt, Artificial Sequence
  Chemically synthesized
acucguguguaauggaaag

SEQ ID NO: 76363 - RNA, 19 nt, Artificial Sequence
  Chemically synthesized
agacuccuccucuucauac

SEQ ID NO: 76364 - RNA, 19 nt, Artificial Sequence
  Chemically synthesized
ucuagaagcucuccuuguu

SEQ ID NO: 76365 - RNA, 19 nt, Artificial Sequence
  Chemically synthesized
ugaaguguccucgagagag

SEQ ID NO: 76366 - RNA, 19 nt, Artificial Sequence
  Chemically synthesized
uccacagaagaacacgcca

SEQ ID NO: 76367 - RNA, 19 nt, Artificial Sequence
  Chemically synthesized
uccaguagaaauacaccuu

SEQ ID NO: 76368 - RNA, 19 nt, Artificial Sequence
  Chemically synthesized
uguaccagaacaacucaua

SEQ ID NO: 76369 - RNA, 19 nt, Artificial Sequence
  Chemically synthesized
acaaugccuggacuugacc

SEQ ID NO: 76370 - RNA, 19 nt, Artificial Sequence
  Chemically synthesized
accuccaaagucuagaagc

SEQ ID NO: 76371 - RNA, 19 nt, Artificial Sequence
  Chemically synthesized
agugaaauacaucugucag

SEQ ID NO: 76372 - RNA, 19 nt, Artificial Sequence
  Chemically synthesized
ccuaaaauccauuuccaag

SEQ ID NO: 76373 - RNA, 19 nt, Artificial Sequence
  Chemically synthesized
ucccauaggcgaccaguuu

SEQ ID NO: 76374 - RNA, 19 nt, Artificial Sequence
  Chemically synthesized
uacuuguuccucuuaugaa

SEQ ID NO: 76375 - RNA, 19 nt, Artificial Sequence
  Chemically synthesized
auuauucaccaguucccaa

SEQ ID NO: 76376 - RNA, 19 nt, Artificial Sequence
  Chemically synthesized
ugaagagccugauuuucau

SEQ ID NO: 76377 - RNA, 19 nt, Artificial Sequence
  Chemically synthesized
uccagggagaguaagagau

SEQ ID NO: 76378 - RNA, 19 nt, Artificial Sequence
  Chemically synthesized
ucugcauagcggucucuac

SEQ ID NO: 76379 - RNA, 19 nt, Artificial Sequence
  Chemically synthesized
uguugugcagagagagacu

SEQ ID NO: 76380 - RNA, 19 nt, Artificial Sequence
  Chemically synthesized
acugucuuggguuuggccu

SEQ ID NO: 76381 - RNA, 19 nt, Artificial Sequence
  Chemically synthesized
aucccauaggcgaccaguu

SEQ ID NO: 76382 - RNA, 19 nt, Artificial Sequence
  Chemically synthesized
auuuucgucccaguguaaa

SEQ ID NO: 76383 - RNA, 19 nt, Artificial Sequence
  Chemically synthesized
aaagccacgcuuuuucaug

SEQ ID NO: 76384 - RNA, 19 nt, Artificial Sequence
  Chemically synthesized
ugaaaucgccagaaccuaa

SEQ ID NO: 76385 - RNA, 19 nt, Artificial Sequence
  Chemically synthesized
augaaauaagguuucgacu

SEQ ID NO: 76386 - RNA, 19 nt, Artificial Sequence
  Chemically synthesized
acugggagcucauaucaac

SEQ ID NO: 76387 - RNA, 19 nt, Artificial Sequence
  Chemically synthesized
cugggagcucauaucaaca

SEQ ID NO: 76388 - RNA, 19 nt, Artificial Sequence
  Chemically synthesized
ucacaggaauuccuggugg

SEQ ID NO: 76389 - RNA, 19 nt, Artificial Sequence
  Chemically synthesized
uguaaucacgucaguauuu

SEQ ID NO: 76390 - RNA, 19 nt, Artificial Sequence
  Chemically synthesized
gucaguauuuucgucccag

SEQ ID NO: 76391 - RNA, 19 nt, Artificial Sequence
  Chemically synthesized
auucuuucacaugcauaca

SEQ ID NO: 76392 - RNA, 19 nt, Artificial Sequence
  Chemically synthesized
ugguauaguguacuguuca

SEQ ID NO: 76393 - RNA, 19 nt, Artificial Sequence
  Chemically synthesized
acacaaugccuggacuuga

SEQ ID NO: 76394 - RNA, 19 nt, Artificial Sequence
  Chemically synthesized
cucuccuuguuguaauaga

SEQ ID NO: 76395 - RNA, 19 nt, Artificial Sequence
  Chemically synthesized
ugauuguaggcaaucugcu

SEQ ID NO: 76396 - RNA, 19 nt, Artificial Sequence
  Chemically synthesized
aagagaucagcaaaccacu

SEQ ID NO: 76397 - RNA, 19 nt, Artificial Sequence
  Chemically synthesized
ugccucacugcauuuguac

SEQ ID NO: 76398 - RNA, 19 nt, Artificial Sequence
  Chemically synthesized
acccucauucaaaauccag

SEQ ID NO: 76399 - RNA, 19 nt, Artificial Sequence
  Chemically synthesized
cuggguagugaaauacauc

SEQ ID NO: 76400 - RNA, 19 nt, Artificial Sequence
  Chemically synthesized
gcugaaaaagucuuccugg

SEQ ID NO: 76401 - RNA, 19 nt, Artificial Sequence
  Chemically synthesized
ucaugugaaguuccaggac

SEQ ID NO: 76402 - RNA, 19 nt, Artificial Sequence
  Chemically synthesized
guugaaaucgccagaaccu

SEQ ID NO: 76403 - RNA, 19 nt, Artificial Sequence
  Chemically synthesized
aauccauuuccaagccgag

SEQ ID NO: 76404 - RNA, 19 nt, Artificial Sequence
  Chemically synthesized
ucugagguuuuugucuaau

SEQ ID NO: 76405 - RNA, 19 nt, Artificial Sequence
  Chemically synthesized
guccucugcagcaaauacu

SEQ ID NO: 76406 - RNA, 19 nt, Artificial Sequence
  Chemically synthesized
aacucguguguaauggaaa

SEQ ID NO: 76407 - RNA, 19 nt, Artificial Sequence
  Chemically synthesized
auaucaacaggccgucaca

SEQ ID NO: 76408 - RNA, 19 nt, Artificial Sequence
  Chemically synthesized
caguauuuucgucccagug

SEQ ID NO: 76409 - RNA, 19 nt, Artificial Sequence
  Chemically synthesized
aucagcaaaccacucaaaa

SEQ ID NO: 76410 - RNA, 19 nt, Artificial Sequence
  Chemically synthesized
augugcacgcugaaaaagu

SEQ ID NO: 76411 - RNA, 19 nt, Artificial Sequence
  Chemically synthesized
guugacgaggucaugauca

SEQ ID NO: 76412 - RNA, 19 nt, Artificial Sequence
  Chemically synthesized
acgccugcuauuguccuua

SEQ ID NO: 76413 - RNA, 19 nt, Artificial Sequence
  Chemically synthesized
uccucuucauaccaguaga

SEQ ID NO: 76414 - RNA, 19 nt, Artificial Sequence
  Chemically synthesized
cuaugugaagagccugauu

SEQ ID NO: 76415 - RNA, 19 nt, Artificial Sequence
  Chemically synthesized
uucaucccagccgguaaga

SEQ ID NO: 76416 - RNA, 19 nt, Artificial Sequence
  Chemically synthesized
ugugccucacugcauuugu

SEQ ID NO: 76417 - RNA, 19 nt, Artificial Sequence
  Chemically synthesized
uugugaaaucugagguuuu

SEQ ID NO: 76418 - RNA, 19 nt, Artificial Sequence
  Chemically synthesized
ucuggauguugggucguua

SEQ ID NO: 76419 - RNA, 19 nt, Artificial Sequence
  Chemically synthesized
cuggacuugaccuccaaag

SEQ ID NO: 76420 - RNA, 19 nt, Artificial Sequence
  Chemically synthesized
auagaaggucuucugcuuu

SEQ ID NO: 76421 - RNA, 19 nt, Artificial Sequence
  Chemically synthesized
aucccagccgguaagaaau

SEQ ID NO: 76422 - RNA, 19 nt, Artificial Sequence
  Chemically synthesized
gccgguaagaaauauauga

SEQ ID NO: 76423 - RNA, 19 nt, Artificial Sequence
  Chemically synthesized
uacaucugucagggcaguu

SEQ ID NO: 76424 - RNA, 19 nt, Artificial Sequence
  Chemically synthesized
ucuucggcugucaggaaau

SEQ ID NO: 76425 - RNA, 19 nt, Artificial Sequence
  Chemically synthesized
cuacagaaggugauguugu

SEQ ID NO: 76426 - RNA, 19 nt, Artificial Sequence
  Chemically synthesized
acagcuaucccauaggcga

SEQ ID NO: 76427 - RNA, 19 nt, Artificial Sequence
  Chemically synthesized
uguucuguuguauaugaca

SEQ ID NO: 76428 - RNA, 19 nt, Artificial Sequence
  Chemically synthesized
cuccuuguuguaauagaaa

SEQ ID NO: 76429 - RNA, 19 nt, Artificial Sequence
  Chemically synthesized
agagaucagcaaaccacuc

SEQ ID NO: 76430 - RNA, 19 nt, Artificial Sequence
  Chemically synthesized
agaaauacaccuugcucag

SEQ ID NO: 76431 - RNA, 19 nt, Artificial Sequence
  Chemically synthesized
ucugugccucacugcauuu

SEQ ID NO: 76432 - RNA, 19 nt, Artificial Sequence
  Chemically synthesized
cacugcaccaagauguacu

SEQ ID NO: 76433 - RNA, 19 nt, Artificial Sequence
  Chemically synthesized
acaugcauacaagaccaca

SEQ ID NO: 76434 - RNA, 19 nt, Artificial Sequence
  Chemically synthesized
ugguguguguaccagaaca

SEQ ID NO: 76435 - RNA, 19 nt, Artificial Sequence
  Chemically synthesized
gugaaaucugagguuuuug

SEQ ID NO: 76436 - RNA, 19 nt, Artificial Sequence
  Chemically synthesized
gucuaauugccuccuccac

SEQ ID NO: 76437 - RNA, 19 nt, Artificial Sequence
  Chemically synthesized
ucgacugacagguauuaga

SEQ ID NO: 76438 - RNA, 19 nt, Artificial Sequence
  Chemically synthesized
uguacuguucacaauaguu

SEQ ID NO: 76439 - RNA, 19 nt, Artificial Sequence
  Chemically synthesized
ucauaucaacaggccguca

SEQ ID NO: 76440 - RNA, 19 nt, Artificial Sequence
  Chemically synthesized
aauacaaguggcacaucuu

SEQ ID NO: 76441 - RNA, 19 nt, Artificial Sequence
  Chemically synthesized
aguggcacaucuuuugaag

SEQ ID NO: 76442 - RNA, 19 nt, Artificial Sequence
  Chemically synthesized
agguccacagaagaacacg

SEQ ID NO: 76443 - RNA, 19 nt, Artificial Sequence
  Chemically synthesized
ugcuuuaagccuguaauca

SEQ ID NO: 76444 - RNA, 19 nt, Artificial Sequence
  Chemically synthesized
cugucugccauucugcaua

SEQ ID NO: 76445 - RNA, 19 nt, Artificial Sequence
  Chemically synthesized
acaugguguguguaccaga

SEQ ID NO: 76446 - RNA, 19 nt, Artificial Sequence
  Chemically synthesized
uggauguugggucguuagu

SEQ ID NO: 76447 - RNA, 19 nt, Artificial Sequence
  Chemically synthesized
acuccuccucuucauacca

SEQ ID NO: 76448 - RNA, 19 nt, Artificial Sequence
  Chemically synthesized
uucccaacugggagcucau

SEQ ID NO: 76449 - RNA, 19 nt, Artificial Sequence
  Chemically synthesized
agaagaacacgccaauacu

SEQ ID NO: 76450 - RNA, 19 nt, Artificial Sequence
  Chemically synthesized
auuuucaucccagccggua

SEQ ID NO: 76451 - RNA, 19 nt, Artificial Sequence
  Chemically synthesized
ugcacgcugaaaaagucuu

SEQ ID NO: 76452 - RNA, 19 nt, Artificial Sequence
  Chemically synthesized
cuucuuguugaaaucgcca

SEQ ID NO: 76453 - RNA, 19 nt, Artificial Sequence
  Chemically synthesized
ugcagagagagacugucuu

SEQ ID NO: 76454 - RNA, 19 nt, Artificial Sequence
  Chemically synthesized
aggaaauuucuucucccuc

SEQ ID NO: 76455 - RNA, 19 nt, Artificial Sequence
  Chemically synthesized
ugacgccugcuauuguccu

SEQ ID NO: 76456 - RNA, 19 nt, Artificial Sequence
  Chemically synthesized
uuggaaagugcggccagaa

SEQ ID NO: 76457 - RNA, 19 nt, Artificial Sequence
  Chemically synthesized
cuccaaagucuagaagcuc

SEQ ID NO: 76458 - RNA, 19 nt, Artificial Sequence
  Chemically synthesized
ucagcugaugaauacaagu

SEQ ID NO: 76459 - RNA, 19 nt, Artificial Sequence
  Chemically synthesized
uugaaguguccucgagaga

SEQ ID NO: 76460 - RNA, 19 nt, Artificial Sequence
  Chemically synthesized
augguggagagacccucau

SEQ ID NO: 76461 - RNA, 19 nt, Artificial Sequence
  Chemically synthesized
uuccagggagaguaagaga

SEQ ID NO: 76462 - RNA, 19 nt, Artificial Sequence
  Chemically synthesized
ucgccagaaccuaauuauu

SEQ ID NO: 76463 - RNA, 19 nt, Artificial Sequence
  Chemically synthesized
uccuugccagaaaauugag

SEQ ID NO: 76464 - RNA, 19 nt, Artificial Sequence
  Chemically synthesized
cugcauagcggucucuaca

SEQ ID NO: 76465 - RNA, 19 nt, Artificial Sequence
  Chemically synthesized
aaagaagacgaugaaaaca

SEQ ID NO: 76466 - RNA, 19 nt, Artificial Sequence
  Chemically synthesized
aacucauaggaggccuguc

SEQ ID NO: 76467 - RNA, 19 nt, Artificial Sequence
  Chemically synthesized
ucaagacuaaagccagaga

SEQ ID NO: 76468 - RNA, 19 nt, Artificial Sequence
  Chemically synthesized
acuuguuccucuuaugaau

SEQ ID NO: 76469 - RNA, 19 nt, Artificial Sequence
  Chemically synthesized
agaacgugucaauaaacag

SEQ ID NO: 76470 - RNA, 19 nt, Artificial Sequence
  Chemically synthesized
auuccugguggaguucuuu

SEQ ID NO: 76471 - RNA, 19 nt, Artificial Sequence
  Chemically synthesized
uauuuucgucccaguguaa

SEQ ID NO: 76472 - RNA, 19 nt, Artificial Sequence
  Chemically synthesized
ugguggagagacccucauu

SEQ ID NO: 76473 - RNA, 19 nt, Artificial Sequence
  Chemically synthesized
caaaccacucaaaagcucu

SEQ ID NO: 76474 - RNA, 19 nt, Artificial Sequence
  Chemically synthesized
cgccagaaccuaauuauuc

SEQ ID NO: 76475 - RNA, 19 nt, Artificial Sequence
  Chemically synthesized
uguugcccagcuuggaaag

SEQ ID NO: 76476 - RNA, 19 nt, Artificial Sequence
  Chemically synthesized
cuggauguugggucguuag

SEQ ID NO: 76477 - RNA, 19 nt, Artificial Sequence
  Chemically synthesized
ugaauacaaguggcacauc

SEQ ID NO: 76478 - RNA, 19 nt, Artificial Sequence
  Chemically synthesized
aguacuaauaugguggaga

SEQ ID NO: 76479 - RNA, 19 nt, Artificial Sequence
  Chemically synthesized
ugcucacucauccguguuu

SEQ ID NO: 76480 - RNA, 19 nt, Artificial Sequence
  Chemically synthesized
ccucacugcauuuguacca

SEQ ID NO: 76481 - RNA, 19 nt, Artificial Sequence
  Chemically synthesized
ucugucagggcaguuccaa

SEQ ID NO: 76482 - RNA, 19 nt, Artificial Sequence
  Chemically synthesized
caccuugguaaugacaacu

SEQ ID NO: 76483 - RNA, 19 nt, Artificial Sequence
  Chemically synthesized
accuugguaaugacaacuu

SEQ ID NO: 76484 - RNA, 19 nt, Artificial Sequence
  Chemically synthesized
gaccacagggccuaaaauc

SEQ ID NO: 76485 - RNA, 19 nt, Artificial Sequence
  Chemically synthesized
ugccauucugcauagcggu

SEQ ID NO: 76486 - RNA, 19 nt, Artificial Sequence
  Chemically synthesized
auucccagccaugagagua

SEQ ID NO: 76487 - RNA, 19 nt, Artificial Sequence
  Chemically synthesized
acaccuugcucagcuucag

SEQ ID NO: 76488 - RNA, 19 nt, Artificial Sequence
  Chemically synthesized
ugccacuccagcgaagaua

SEQ ID NO: 76489 - RNA, 19 nt, Artificial Sequence
  Chemically synthesized
auuuuaaagccacgcuuuu

SEQ ID NO: 76490 - RNA, 19 nt, Artificial Sequence
  Chemically synthesized
uggcuuaccaccuugguaa

SEQ ID NO: 76491 - RNA, 19 nt, Artificial Sequence
  Chemically synthesized
uaccaccuugguaaugaca

SEQ ID NO: 76492 - RNA, 19 nt, Artificial Sequence
  Chemically synthesized
guaccagaacaacucauag

SEQ ID NO: 76493 - RNA, 19 nt, Artificial Sequence
  Chemically synthesized
guugagguagcucucguua

SEQ ID NO: 76494 - RNA, 19 nt, Artificial Sequence
  Chemically synthesized
agaaaugcgccacgaugug

SEQ ID NO: 76495 - RNA, 19 nt, Artificial Sequence
  Chemically synthesized
gaaagacuccuccucuuca

SEQ ID NO: 76496 - RNA, 19 nt, Artificial Sequence
  Chemically synthesized
ggaaguaugguauagugua

SEQ ID NO: 76497 - RNA, 19 nt, Artificial Sequence
  Chemically synthesized
aagcucuccuuguuguaau

SEQ ID NO: 76498 - RNA, 19 nt, Artificial Sequence
  Chemically synthesized
ggugauuguaggcaaucug

SEQ ID NO: 76499 - RNA, 19 nt, Artificial Sequence
  Chemically synthesized
cugcuugaacucauuguuc

SEQ ID NO: 76500 - RNA, 19 nt, Artificial Sequence
  Chemically synthesized
acaacucauaggaggccug

SEQ ID NO: 76501 - RNA, 19 nt, Artificial Sequence
  Chemically synthesized
aggccugucugaugaacuc

SEQ ID NO: 76502 - RNA, 19 nt, Artificial Sequence
  Chemically synthesized
cucuucauaccaguagaac

SEQ ID NO: 76503 - RNA, 19 nt, Artificial Sequence
  Chemically synthesized
aaacacaaugccuggacuu

SEQ ID NO: 76504 - RNA, 19 nt, Artificial Sequence
  Chemically synthesized
gucuagaagcucuccuugu

SEQ ID NO: 76505 - RNA, 19 nt, Artificial Sequence
  Chemically synthesized
guuaguaagggcuucccua

SEQ ID NO: 76506 - RNA, 19 nt, Artificial Sequence
  Chemically synthesized
agaacacgccaauacugcu

SEQ ID NO: 76507 - RNA, 19 nt, Artificial Sequence
  Chemically synthesized
ucccggcaaauccaguaga

SEQ ID NO: 76508 - RNA, 19 nt, Artificial Sequence
  Chemically synthesized
auuucagaagagcagcgaa

SEQ ID NO: 76509 - RNA, 19 nt, Artificial Sequence
  Chemically synthesized
ccucauucaaaauccagca

SEQ ID NO: 76510 - RNA, 19 nt, Artificial Sequence
  Chemically synthesized
aucugucagggcaguucca

SEQ ID NO: 76511 - RNA, 19 nt, Artificial Sequence
  Chemically synthesized
ugcccuggcgccauuuuaa

SEQ ID NO: 76512 - RNA, 19 nt, Artificial Sequence
  Chemically synthesized
cuuguugcucuucggcugu

SEQ ID NO: 76513 - RNA, 19 nt, Artificial Sequence
  Chemically synthesized
acagggccuaaaauccauu

SEQ ID NO: 76514 - RNA, 19 nt, Artificial Sequence
  Chemically synthesized
uaagggcuucccuaguaaa

SEQ ID NO: 76515 - RNA, 19 nt, Artificial Sequence
  Chemically synthesized
augguguguguaccagaac

SEQ ID NO: 76516 - RNA, 19 nt, Artificial Sequence
  Chemically synthesized
aguugacgaggucaugauc

SEQ ID NO: 76517 - RNA, 19 nt, Artificial Sequence
  Chemically synthesized
ugacgaggucaugaucaag

SEQ ID NO: 76518 - RNA, 19 nt, Artificial Sequence
  Chemically synthesized
gucaugaucaagacuaaag

SEQ ID NO: 76519 - RNA, 19 nt, Artificial Sequence
  Chemically synthesized
agugguagcguuccagguu

SEQ ID NO: 76520 - RNA, 19 nt, Artificial Sequence
  Chemically synthesized
ucugcagcaaauacuuguu

SEQ ID NO: 76521 - RNA, 19 nt, Artificial Sequence
  Chemically synthesized
cguguguaauggaaagacu

SEQ ID NO: 76522 - RNA, 19 nt, Artificial Sequence
  Chemically synthesized
gcucauaucaacaggccgu

SEQ ID NO: 76523 - RNA, 19 nt, Artificial Sequence
  Chemically synthesized
gaagaacacgccaauacug

SEQ ID NO: 76524 - RNA, 19 nt, Artificial Sequence
  Chemically synthesized
cugcuuuaagccuguaauc

SEQ ID NO: 76525 - RNA, 19 nt, Artificial Sequence
  Chemically synthesized
cuguaaucacgucaguauu

SEQ ID NO: 76526 - RNA, 19 nt, Artificial Sequence
  Chemically synthesized
ucacugcauuuguaccaua

SEQ ID NO: 76527 - RNA, 19 nt, Artificial Sequence
  Chemically synthesized
ucugaugaacucaguugac

SEQ ID NO: 76528 - RNA, 19 nt, Artificial Sequence
  Chemically synthesized
agccagagagaucaccaga

SEQ ID NO: 76529 - RNA, 19 nt, Artificial Sequence
  Chemically synthesized
ugaagaaaugcgccacgau

SEQ ID NO: 76530 - RNA, 19 nt, Artificial Sequence
  Chemically synthesized
aagccaguguugaacccaa

SEQ ID NO: 76531 - RNA, 19 nt, Artificial Sequence
  Chemically synthesized
guguugaacccaaaauaac

SEQ ID NO: 76532 - RNA, 19 nt, Artificial Sequence
  Chemically synthesized
gucacaggaauuccuggug

SEQ ID NO: 76533 - RNA, 19 nt, Artificial Sequence
  Chemically synthesized
cccaguguaaagcuaugug

SEQ ID NO: 76534 - RNA, 19 nt, Artificial Sequence
  Chemically synthesized
aguguaaagcuaugugaag

SEQ ID NO: 76535 - RNA, 19 nt, Artificial Sequence
  Chemically synthesized
uaaagccacgcuuuuucau

SEQ ID NO: 76536 - RNA, 19 nt, Artificial Sequence
  Chemically synthesized
uggguuuggccucgaacaa

SEQ ID NO: 76537 - RNA, 19 nt, Artificial Sequence
  Chemically synthesized
ugcuauuguccuuagcaau

SEQ ID NO: 76538 - RNA, 19 nt, Artificial Sequence
  Chemically synthesized
cucaccugugucuggaugu

SEQ ID NO: 76539 - RNA, 19 nt, Artificial Sequence
  Chemically synthesized
caccugugucuggauguug

SEQ ID NO: 76540 - RNA, 19 nt, Artificial Sequence
  Chemically synthesized
ugucuggauguugggucgu

SEQ ID NO: 76541 - RNA, 19 nt, Artificial Sequence
  Chemically synthesized
aagacuccuccucuucaua

SEQ ID NO: 76542 - RNA, 19 nt, Artificial Sequence
  Chemically synthesized
guagaacgugucaauaaac

SEQ ID NO: 76543 - RNA, 19 nt, Artificial Sequence
  Chemically synthesized
guucuuuggaaucaauaac

SEQ ID NO: 76544 - RNA, 19 nt, Artificial Sequence
  Chemically synthesized
uggacuugaccuccaaagu

SEQ ID NO: 76545 - RNA, 19 nt, Artificial Sequence
  Chemically synthesized
acaucuuuugaaguguccu

SEQ ID NO: 76546 - RNA, 19 nt, Artificial Sequence
  Chemically synthesized
guguccucgagagagcuuu

SEQ ID NO: 76547 - RNA, 19 nt, Artificial Sequence
  Chemically synthesized
cucacucauccguguuucc

SEQ ID NO: 76548 - RNA, 19 nt, Artificial Sequence
  Chemically synthesized
gugaaguuccaggacucca

SEQ ID NO: 76549 - RNA, 19 nt, Artificial Sequence
  Chemically synthesized
ccauucugcauagcggucu

SEQ ID NO: 76550 - RNA, 19 nt, Artificial Sequence
  Chemically synthesized
cugagguuuuugucuaauu

SEQ ID NO: 76551 - RNA, 19 nt, Artificial Sequence
  Chemically synthesized
uggaaagacuccuccucuu

SEQ ID NO: 76552 - RNA, 19 nt, Artificial Sequence
  Chemically synthesized
ucccagccaugagaguacu

SEQ ID NO: 76553 - RNA, 19 nt, Artificial Sequence
  Chemically synthesized
gaagagccugauuuucauc

SEQ ID NO: 76554 - RNA, 19 nt, Artificial Sequence
  Chemically synthesized
ccgguaagaaauauaugau

SEQ ID NO: 76555 - RNA, 19 nt, Artificial Sequence
  Chemically synthesized
agaucagcaaaccacucaa

SEQ ID NO: 76556 - RNA, 19 nt, Artificial Sequence
  Chemically synthesized
acugcauuuguaccauaua

SEQ ID NO: 76557 - RNA, 19 nt, Artificial Sequence
  Chemically synthesized
ggugauguugugcagagag

SEQ ID NO: 76558 - RNA, 19 nt, Artificial Sequence
  Chemically synthesized
gcaguuaaaauucaggcac

SEQ ID NO: 76559 - RNA, 19 nt, Artificial Sequence
  Chemically synthesized
cuugaccuccaaagucuag

SEQ ID NO: 76560 - RNA, 19 nt, Artificial Sequence
  Chemically synthesized
agccaugagaguacuaaua

SEQ ID NO: 76561 - RNA, 19 nt, Artificial Sequence
  Chemically synthesized
aaguguccucgagagagcu

SEQ ID NO: 76562 - RNA, 19 nt, Artificial Sequence
  Chemically synthesized
uguccucgagagagcuuua

SEQ ID NO: 76563 - RNA, 19 nt, Artificial Sequence
  Chemically synthesized
ccauagaaggucuucugcu

SEQ ID NO: 76564 - RNA, 19 nt, Artificial Sequence
  Chemically synthesized
gccugauuuucaucccagc

SEQ ID NO: 76565 - RNA, 19 nt, Artificial Sequence
  Chemically synthesized
guaccauauagauuucaga

SEQ ID NO: 76566 - RNA, 19 nt, Artificial Sequence
  Chemically synthesized
acacacuggguagugaaau

SEQ ID NO: 76567 - RNA, 19 nt, Artificial Sequence
  Chemically synthesized
ugaacucaguugacgaggu

SEQ ID NO: 76568 - RNA, 19 nt, Artificial Sequence
  Chemically synthesized
agaauuagcaugcaguuaa

SEQ ID NO: 76569 - RNA, 19 nt, Artificial Sequence
  Chemically synthesized
guuaaaauucaggcacagu

SEQ ID NO: 76570 - RNA, 19 nt, Artificial Sequence
  Chemically synthesized
caacugggagcucauauca

SEQ ID NO: 76571 - RNA, 19 nt, Artificial Sequence
  Chemically synthesized
aacugggagcucauaucaa

SEQ ID NO: 76572 - RNA, 19 nt, Artificial Sequence
  Chemically synthesized
uggaguucuuuggaaucaa

SEQ ID NO: 76573 - RNA, 19 nt, Artificial Sequence
  Chemically synthesized
gagagcuuuagguccacag

SEQ ID NO: 76574 - RNA, 19 nt, Artificial Sequence
  Chemically synthesized
guauuuucgucccagugua

SEQ ID NO: 76575 - RNA, 19 nt, Artificial Sequence
  Chemically synthesized
guguaaagcuaugugaaga

SEQ ID NO: 76576 - RNA, 19 nt, Artificial Sequence
  Chemically synthesized
acucagaaagugaguuuuc

SEQ ID NO: 76577 - RNA, 19 nt, Artificial Sequence
  Chemically synthesized
cacucauccguguuuccag

SEQ ID NO: 76578 - RNA, 19 nt, Artificial Sequence
  Chemically synthesized
agcaaaccacucaaaagcu

SEQ ID NO: 76579 - RNA, 19 nt, Artificial Sequence
  Chemically synthesized
gugcacgcugaaaaagucu

SEQ ID NO: 76580 - RNA, 19 nt, Artificial Sequence
  Chemically synthesized
caccaagauguacugcccu

SEQ ID NO: 76581 - RNA, 19 nt, Artificial Sequence
  Chemically synthesized
acgcuuuuucaugugaagu

SEQ ID NO: 76582 - RNA, 19 nt, Artificial Sequence
  Chemically synthesized
gugcagagagagacugucu

SEQ ID NO: 76583 - RNA, 19 nt, Artificial Sequence
  Chemically synthesized
uguguaccagaacaacuca

SEQ ID NO: 76584 - RNA, 19 nt, Artificial Sequence
  Chemically synthesized
caguguugaacccaaaaua

SEQ ID NO: 76585 - RNA, 19 nt, Artificial Sequence
  Chemically synthesized
accaguagaacgugucaau

SEQ ID NO: 76586 - RNA, 19 nt, Artificial Sequence
  Chemically synthesized
auaguguacuguucacaau

SEQ ID NO: 76587 - RNA, 19 nt, Artificial Sequence
  Chemically synthesized
cucgagagagcuuuagguc

SEQ ID NO: 76588 - RNA, 19 nt, Artificial Sequence
  Chemically synthesized
gcucacucauccguguuuc

SEQ ID NO: 76589 - RNA, 19 nt, Artificial Sequence
  Chemically synthesized
uguuuccagggagaguaag

SEQ ID NO: 76590 - RNA, 19 nt, Artificial Sequence
  Chemically synthesized
gggagaguaagagaucagc

SEQ ID NO: 76591 - RNA, 19 nt, Artificial Sequence
  Chemically synthesized
gaguaagagaucagcaaac

SEQ ID NO: 76592 - RNA, 19 nt, Artificial Sequence
  Chemically synthesized
caccuugcucagcuucagu

SEQ ID NO: 76593 - RNA, 19 nt, Artificial Sequence
  Chemically synthesized
acuggguagugaaauacau

SEQ ID NO: 76594 - RNA, 19 nt, Artificial Sequence
  Chemically synthesized
ccuugguaaugacaacuuc

SEQ ID NO: 76595 - RNA, 19 nt, Artificial Sequence
  Chemically synthesized
cuuucacaugcauacaaga

SEQ ID NO: 76596 - RNA, 19 nt, Artificial Sequence
  Chemically synthesized
auggccaggcugagaaaga

SEQ ID NO: 76597 - RNA, 19 nt, Artificial Sequence
  Chemically synthesized
gcugagaaagaagacgaug

SEQ ID NO: 76598 - RNA, 19 nt, Artificial Sequence
  Chemically synthesized
agaaagaagacgaugaaaa

SEQ ID NO: 76599 - RNA, 19 nt, Artificial Sequence
  Chemically synthesized
cugucugaugaacucaguu

SEQ ID NO: 76600 - RNA, 19 nt, Artificial Sequence
  Chemically synthesized
cugugucuggauguugggu

SEQ ID NO: 76601 - RNA, 19 nt, Artificial Sequence
  Chemically synthesized
aguguugaacccaaaauaa

SEQ ID NO: 76602 - RNA, 19 nt, Artificial Sequence
  Chemically synthesized
gaugaauacaaguggcaca

SEQ ID NO: 76603 - RNA, 19 nt, Artificial Sequence
  Chemically synthesized
guaaucacgucaguauuuu

SEQ ID NO: 76604 - RNA, 19 nt, Artificial Sequence
  Chemically synthesized
uggagagacccucauucaa

SEQ ID NO: 76605 - RNA, 19 nt, Artificial Sequence
  Chemically synthesized
cuuguugaaaucgccagaa

SEQ ID NO: 76606 - RNA, 19 nt, Artificial Sequence
  Chemically synthesized
cauagcggucucuacagaa

SEQ ID NO: 76607 - RNA, 19 nt, Artificial Sequence
  Chemically synthesized
agaagacgaugaaaacaug

SEQ ID NO: 76608 - RNA, 19 nt, Artificial Sequence
  Chemically synthesized
agcaauucagugguugugu

SEQ ID NO: 76609 - RNA, 19 nt, Artificial Sequence
  Chemically synthesized
guagcguuccagguugaag

SEQ ID NO: 76610 - RNA, 19 nt, Artificial Sequence
  Chemically synthesized
ugugaaaucugagguuuuu

SEQ ID NO: 76611 - RNA, 19 nt, Artificial Sequence
  Chemically synthesized
acugacagguauuagaauu

SEQ ID NO: 76612 - RNA, 19 nt, Artificial Sequence
  Chemically synthesized
caagccaguguugaaccca

SEQ ID NO: 76613 - RNA, 19 nt, Artificial Sequence
  Chemically synthesized
cucguguguaauggaaaga

SEQ ID NO: 76614 - RNA, 19 nt, Artificial Sequence
  Chemically synthesized
acuugaccuccaaagucua

SEQ ID NO: 76615 - RNA, 19 nt, Artificial Sequence
  Chemically synthesized
aguaagggcuucccuagua

SEQ ID NO: 76616 - RNA, 19 nt, Artificial Sequence
  Chemically synthesized
accaccuugguaaugacaa

SEQ ID NO: 76617 - RNA, 19 nt, Artificial Sequence
  Chemically synthesized
agagacugucuuggguuug

SEQ ID NO: 76618 - RNA, 19 nt, Artificial Sequence
  Chemically synthesized
gacgaggucaugaucaaga

SEQ ID NO: 76619 - RNA, 19 nt, Artificial Sequence
  Chemically synthesized
aagacuaaagccagagaga

SEQ ID NO: 76620 - RNA, 19 nt, Artificial Sequence
  Chemically synthesized
gacuaaagccagagagauc

SEQ ID NO: 76621 - RNA, 19 nt, Artificial Sequence
  Chemically synthesized
guuccagguugaagaaaug

SEQ ID NO: 76622 - RNA, 19 nt, Artificial Sequence
  Chemically synthesized
acgauguggaugguugcau

SEQ ID NO: 76623 - RNA, 19 nt, Artificial Sequence
  Chemically synthesized
ccucugcagcaaauacuug

SEQ ID NO: 76624 - RNA, 19 nt, Artificial Sequence
  Chemically synthesized
uguuccucuuaugaaugaa

SEQ ID NO: 76625 - RNA, 19 nt, Artificial Sequence
  Chemically synthesized
ugcccaagccaguguugaa

SEQ ID NO: 76626 - RNA, 19 nt, Artificial Sequence
  Chemically synthesized
guaggcaaucugcuugaac

SEQ ID NO: 76627 - RNA, 19 nt, Artificial Sequence
  Chemically synthesized
aggcaaucugcuugaacuc

SEQ ID NO: 76628 - RNA, 19 nt, Artificial Sequence
  Chemically synthesized
ucaucccagccgguaagaa

SEQ ID NO: 76629 - RNA, 19 nt, Artificial Sequence
  Chemically synthesized
auccguguuuccagggaga

SEQ ID NO: 76630 - RNA, 19 nt, Artificial Sequence
  Chemically synthesized
caucccggcaaauccagua

SEQ ID NO: 76631 - RNA, 19 nt, Artificial Sequence
  Chemically synthesized
gaagauauggcugggcacu

SEQ ID NO: 76632 - RNA, 19 nt, Artificial Sequence
  Chemically synthesized
gcgccauuuuaaagccacg

SEQ ID NO: 76633 - RNA, 19 nt, Artificial Sequence
  Chemically synthesized
acaacuucuuguugaaauc

SEQ ID NO: 76634 - RNA, 19 nt, Artificial Sequence
  Chemically synthesized
acugucugccauucugcau

SEQ ID NO: 76635 - RNA, 19 nt, Artificial Sequence
  Chemically synthesized
agagagacugucuuggguu

SEQ ID NO: 76636 - RNA, 19 nt, Artificial Sequence
  Chemically synthesized
gguuuggccucgaacaauc

SEQ ID NO: 76637 - RNA, 19 nt, Artificial Sequence
  Chemically synthesized
gaaaacaugguguguguac

SEQ ID NO: 76638 - RNA, 19 nt, Artificial Sequence
  Chemically synthesized
guguguguaccagaacaac

SEQ ID NO: 76639 - RNA, 19 nt, Artificial Sequence
  Chemically synthesized
acucaguugacgaggucau

SEQ ID NO: 76640 - RNA, 19 nt, Artificial Sequence
  Chemically synthesized
ccugcuauuguccuuagca

SEQ ID NO: 76641 - RNA, 19 nt, Artificial Sequence
  Chemically synthesized
cagcaaauacuuguuccuc

SEQ ID NO: 76642 - RNA, 19 nt, Artificial Sequence
  Chemically synthesized
ugguggaguucuuuggaau

SEQ ID NO: 76643 - RNA, 19 nt, Artificial Sequence
  Chemically synthesized
acagaagaacacgccaaua

SEQ ID NO: 76644 - RNA, 19 nt, Artificial Sequence
  Chemically synthesized
gucccaguguaaagcuaug

SEQ ID NO: 76645 - RNA, 19 nt, Artificial Sequence
  Chemically synthesized
guggagagacccucauuca

SEQ ID NO: 76646 - RNA, 19 nt, Artificial Sequence
  Chemically synthesized
aauacaccuugcucagcuu

SEQ ID NO: 76647 - RNA, 19 nt, Artificial Sequence
  Chemically synthesized
cccuggcgccauuuuaaag

SEQ ID NO: 76648 - RNA, 19 nt, Artificial Sequence
  Chemically synthesized
caugauacuuguugcucuu

SEQ ID NO: 76649 - RNA, 19 nt, Artificial Sequence
  Chemically synthesized
gaaaucgccagaaccuaau

SEQ ID NO: 76650 - RNA, 19 nt, Artificial Sequence
  Chemically synthesized
gccagaaccuaauuauucu

SEQ ID NO: 76651 - RNA, 19 nt, Artificial Sequence
  Chemically synthesized
aguagaacgugucaauaaa

SEQ ID NO: 76652 - RNA, 19 nt, Artificial Sequence
  Chemically synthesized
cgucacaggaauuccuggu

SEQ ID NO: 76653 - RNA, 19 nt, Artificial Sequence
  Chemically synthesized
aguugggccucccauagaa

SEQ ID NO: 76654 - RNA, 19 nt, Artificial Sequence
  Chemically synthesized
ucccagccgguaagaaaua

SEQ ID NO: 76655 - RNA, 19 nt, Artificial Sequence
  Chemically synthesized
agaguaagagaucagcaaa

SEQ ID NO: 76656 - RNA, 19 nt, Artificial Sequence
  Chemically synthesized
guaagagaucagcaaacca

SEQ ID NO: 76657 - RNA, 19 nt, Artificial Sequence
  Chemically synthesized
acacacacacuggguagug

SEQ ID NO: 76658 - RNA, 19 nt, Artificial Sequence
  Chemically synthesized
cgcugaaaaagucuuccug

SEQ ID NO: 76659 - RNA, 19 nt, Artificial Sequence
  Chemically synthesized
gccauuuuaaagccacgcu

SEQ ID NO: 76660 - RNA, 19 nt, Artificial Sequence
  Chemically synthesized
cggcugucaggaaauuucu

SEQ ID NO: 76661 - RNA, 19 nt, Artificial Sequence
  Chemically synthesized
guguaccagaacaacucau

SEQ ID NO: 76662 - RNA, 19 nt, Artificial Sequence
  Chemically synthesized
gaggucaugaucaagacua

SEQ ID NO: 76663 - RNA, 19 nt, Artificial Sequence
  Chemically synthesized
auguggaugguugcauuaa

SEQ ID NO: 76664 - RNA, 19 nt, Artificial Sequence
  Chemically synthesized
ucaccugugucuggauguu

SEQ ID NO: 76665 - RNA, 19 nt, Artificial Sequence
  Chemically synthesized
gguugcauuaacagcuauc

SEQ ID NO: 76666 - RNA, 19 nt, Artificial Sequence
  Chemically synthesized
agggcuucccuaguaaauu

SEQ ID NO: 76667 - RNA, 19 nt, Artificial Sequence
  Chemically synthesized
cccaaaauaacucgugugu

SEQ ID NO: 76668 - RNA, 19 nt, Artificial Sequence
  Chemically synthesized
ccaacugggagcucauauc

SEQ ID NO: 76669 - RNA, 19 nt, Artificial Sequence
  Chemically synthesized
agaagcucuccuuguugua

SEQ ID NO: 76670 - RNA, 19 nt, Artificial Sequence
  Chemically synthesized
cccauagaaggucuucugc

SEQ ID NO: 76671 - RNA, 19 nt, Artificial Sequence
  Chemically synthesized
cauagaaggucuucugcuu

SEQ ID NO: 76672 - RNA, 19 nt, Artificial Sequence
  Chemically synthesized
cugcucacucauccguguu

SEQ ID NO: 76673 - RNA, 19 nt, Artificial Sequence
  Chemically synthesized
cacugcauuuguaccauau

SEQ ID NO: 76674 - RNA, 19 nt, Artificial Sequence
  Chemically synthesized
acacacacuggguagugaa

SEQ ID NO: 76675 - RNA, 19 nt, Artificial Sequence
  Chemically synthesized
aaguuccaggacuccagag

SEQ ID NO: 76676 - RNA, 19 nt, Artificial Sequence
  Chemically synthesized
ugacaacuucuuguugaaa

SEQ ID NO: 76677 - RNA, 19 nt, Artificial Sequence
  Chemically synthesized
cucuucggcugucaggaaa

SEQ ID NO: 76678 - RNA, 19 nt, Artificial Sequence
  Chemically synthesized
ccagaaaauugaggcacgg

SEQ ID NO: 76679 - RNA, 19 nt, Artificial Sequence
  Chemically synthesized
caggaaauuucuucucccu

SEQ ID NO: 76680 - RNA, 19 nt, Artificial Sequence
  Chemically synthesized
cucaguugacgaggucaug

SEQ ID NO: 76681 - RNA, 19 nt, Artificial Sequence
  Chemically synthesized
gaaauuucuucucccucac

SEQ ID NO: 76682 - RNA, 19 nt, Artificial Sequence
  Chemically synthesized
aagggcuucccuaguaaau

SEQ ID NO: 76683 - RNA, 19 nt, Artificial Sequence
  Chemically synthesized
guggaugguugcauuaaca

SEQ ID NO: 76684 - RNA, 19 nt, Artificial Sequence
  Chemically synthesized
guuccucuuaugaaugaaa

SEQ ID NO: 76685 - RNA, 19 nt, Artificial Sequence
  Chemically synthesized
caaugccuggacuugaccu

SEQ ID NO: 76686 - RNA, 19 nt, Artificial Sequence
  Chemically synthesized
ccaugagaguacuaauaug

SEQ ID NO: 76687 - RNA, 19 nt, Artificial Sequence
  Chemically synthesized
ccagggagaguaagagauc

SEQ ID NO: 76688 - RNA, 19 nt, Artificial Sequence
  Chemically synthesized
ggagaguaagagaucagca

SEQ ID NO: 76689 - RNA, 19 nt, Artificial Sequence
  Chemically synthesized
gaaauacaccuugcucagc

SEQ ID NO: 76690 - RNA, 19 nt, Artificial Sequence
  Chemically synthesized
cucuacagaaggugauguu

SEQ ID NO: 76691 - RNA, 19 nt, Artificial Sequence
  Chemically synthesized
ucuuggguuuggccucgaa

SEQ ID NO: 76692 - RNA, 19 nt, Artificial Sequence
  Chemically synthesized
gaggccugucugaugaacu

SEQ ID NO: 76693 - RNA, 19 nt, Artificial Sequence
  Chemically synthesized
gaccaguuugugaaaucug

SEQ ID NO: 76694 - RNA, 19 nt, Artificial Sequence
  Chemically synthesized
ccaguuugugaaaucugag

SEQ ID NO: 76695 - RNA, 19 nt, Artificial Sequence
  Chemically synthesized
guuugugaaaucugagguu

SEQ ID NO: 76696 - RNA, 19 nt, Artificial Sequence
  Chemically synthesized
gggagcucauaucaacagg

SEQ ID NO: 76697 - RNA, 19 nt, Artificial Sequence
  Chemically synthesized
caggaauuccugguggagu

SEQ ID NO: 76698 - RNA, 19 nt, Artificial Sequence
  Chemically synthesized
aauuccugguggaguucuu

SEQ ID NO: 76699 - RNA, 19 nt, Artificial Sequence
  Chemically synthesized
uacuaauaugguggagaga

SEQ ID NO: 76700 - RNA, 19 nt, Artificial Sequence
  Chemically synthesized
gcuuuaagccuguaaucac

SEQ ID NO: 76701 - RNA, 19 nt, Artificial Sequence
  Chemically synthesized
gagacccucauucaaaauc

SEQ ID NO: 76702 - RNA, 19 nt, Artificial Sequence
  Chemically synthesized
aaaucgccagaaccuaauu

SEQ ID NO: 76703 - RNA, 19 nt, Artificial Sequence
  Chemically synthesized
gccugucugaugaacucag

SEQ ID NO: 76704 - RNA, 19 nt, Artificial Sequence
  Chemically synthesized
gguuuuugucuaauugccu

SEQ ID NO: 76705 - RNA, 19 nt, Artificial Sequence
  Chemically synthesized
auucaggcacagugcggau

SEQ ID NO: 76706 - RNA, 19 nt, Artificial Sequence
  Chemically synthesized
guucuguuguauaugacau

SEQ ID NO: 76707 - RNA, 19 nt, Artificial Sequence
  Chemically synthesized
gcucuccuuguuguaauag

SEQ ID NO: 76708 - RNA, 19 nt, Artificial Sequence
  Chemically synthesized
guggcacaucuuuugaagu

SEQ ID NO: 76709 - RNA, 19 nt, Artificial Sequence
  Chemically synthesized
aguguccucgagagagcuu

SEQ ID NO: 76710 - RNA, 19 nt, Artificial Sequence
  Chemically synthesized
agcuuuagguccacagaag

SEQ ID NO: 76711 - RNA, 19 nt, Artificial Sequence
  Chemically synthesized
gaacucauuguuccaguug

SEQ ID NO: 76712 - RNA, 19 nt, Artificial Sequence
  Chemically synthesized
cagccgguaagaaauauau

SEQ ID NO: 76713 - RNA, 19 nt, Artificial Sequence
  Chemically synthesized
gucugugccucacugcauu

SEQ ID NO: 76714 - RNA, 19 nt, Artificial Sequence
  Chemically synthesized
ccauauagauuucagaaga

SEQ ID NO: 76715 - RNA, 19 nt, Artificial Sequence
  Chemically synthesized
ccauuuuaaagccacgcuu

SEQ ID NO: 76716 - RNA, 19 nt, Artificial Sequence
  Chemically synthesized
agacuaaagccagagagau

SEQ ID NO: 76717 - RNA, 19 nt, Artificial Sequence
  Chemically synthesized
cuaaagccagagagaucac

SEQ ID NO: 76718 - RNA, 19 nt, Artificial Sequence
  Chemically synthesized
gguccucugcagcaaauac

SEQ ID NO: 76719 - RNA, 19 nt, Artificial Sequence
  Chemically synthesized
gcaaauacuuguuccucuu

SEQ ID NO: 76720 - RNA, 19 nt, Artificial Sequence
  Chemically synthesized
gcaugcaguuaaaauucag

SEQ ID NO: 76721 - RNA, 19 nt, Artificial Sequence
  Chemically synthesized
ccaguguugaacccaaaau

SEQ ID NO: 76722 - RNA, 19 nt, Artificial Sequence
  Chemically synthesized
uauucccagccaugagagu

SEQ ID NO: 76723 - RNA, 19 nt, Artificial Sequence
  Chemically synthesized
cguguuuccagggagagua

SEQ ID NO: 76724 - RNA, 19 nt, Artificial Sequence
  Chemically synthesized
caugugaaguuccaggacu

SEQ ID NO: 76725 - RNA, 19 nt, Artificial Sequence
  Chemically synthesized
gacaacuucuuguugaaau

SEQ ID NO: 76726 - RNA, 19 nt, Artificial Sequence
  Chemically synthesized
gaaggugauguugugcaga

SEQ ID NO: 76727 - RNA, 19 nt, Artificial Sequence
  Chemically synthesized
gugauguugugcagagaga

SEQ ID NO: 76728 - RNA, 19 nt, Artificial Sequence
  Chemically synthesized
guguugcccagcuuggaaa

SEQ ID NO: 76729 - RNA, 19 nt, Artificial Sequence
  Chemically synthesized
ggaugguugcauuaacagc

SEQ ID NO: 76730 - RNA, 19 nt, Artificial Sequence
  Chemically synthesized
cccaacugggagcucauau

SEQ ID NO: 76731 - RNA, 19 nt, Artificial Sequence
  Chemically synthesized
acaggaauuccugguggag

SEQ ID NO: 76732 - RNA, 19 nt, Artificial Sequence
  Chemically synthesized
ccagccaugagaguacuaa

SEQ ID NO: 76733 - RNA, 19 nt, Artificial Sequence
  Chemically synthesized
ccucgagagagcuuuaggu

SEQ ID NO: 76734 - RNA, 19 nt, Artificial Sequence
  Chemically synthesized
cucacugcauuuguaccau

SEQ ID NO: 76735 - RNA, 19 nt, Artificial Sequence
  Chemically synthesized
gccaggcugagaaagaaga

SEQ ID NO: 76736 - RNA, 19 nt, Artificial Sequence
  Chemically synthesized
acaggccgucacaggaauu

SEQ ID NO: 76737 - RNA, 19 nt, Artificial Sequence
  Chemically synthesized
gauugaaaacacaaugccu

SEQ ID NO: 76738 - RNA, 19 nt, Artificial Sequence
  Chemically synthesized
gucagcugaugaauacaag

SEQ ID NO: 76739 - RNA, 19 nt, Artificial Sequence
  Chemically synthesized
ugaacucauuguuccaguu

SEQ ID NO: 76740 - RNA, 19 nt, Artificial Sequence
  Chemically synthesized
ccagccgguaagaaauaua

SEQ ID NO: 76741 - RNA, 19 nt, Artificial Sequence
  Chemically synthesized
cugucagggcaguuccaaa

SEQ ID NO: 76742 - RNA, 19 nt, Artificial Sequence
  Chemically synthesized
gaugugcacgcugaaaaag

SEQ ID NO: 76743 - RNA, 19 nt, Artificial Sequence
  Chemically synthesized
cauuuuaaagccacgcuuu

SEQ ID NO: 76744 - RNA, 19 nt, Artificial Sequence
  Chemically synthesized
cagggccuaaaauccauuu

SEQ ID NO: 76745 - RNA, 19 nt, Artificial Sequence
  Chemically synthesized
gauguugugcagagagaga

SEQ ID NO: 76746 - RNA, 19 nt, Artificial Sequence
  Chemically synthesized
caugguguguguaccagaa

SEQ ID NO: 76747 - RNA, 19 nt, Artificial Sequence
  Chemically synthesized
gcuauuguccuuagcaauu

SEQ ID NO: 76748 - RNA, 19 nt, Artificial Sequence
  Chemically synthesized
cguuccagguugaagaaau

SEQ ID NO: 76749 - RNA, 19 nt, Artificial Sequence
  Chemically synthesized
ggaaagacuccuccucuuc

SEQ ID NO: 76750 - RNA, 19 nt, Artificial Sequence
  Chemically synthesized
ucccaacugggagcucaua

SEQ ID NO: 76751 - RNA, 19 nt, Artificial Sequence
  Chemically synthesized
cguuaguaagggcuucccu

SEQ ID NO: 76752 - RNA, 19 nt, Artificial Sequence
  Chemically synthesized
cacagaagaacacgccaau

SEQ ID NO: 76753 - RNA, 19 nt, Artificial Sequence
  Chemically synthesized
guuuccagggagaguaaga

SEQ ID NO: 76754 - RNA, 19 nt, Artificial Sequence
  Chemically synthesized
gcaaaccacucaaaagcuc

SEQ ID NO: 76755 - RNA, 19 nt, Artificial Sequence
  Chemically synthesized
gccucacugcauuuguacc

SEQ ID NO: 76756 - RNA, 19 nt, Artificial Sequence
  Chemically synthesized
ccagaaccuaauuauucuu

SEQ ID NO: 76757 - RNA, 19 nt, Artificial Sequence
  Chemically synthesized
aggugauguugugcagaga

SEQ ID NO: 76758 - RNA, 19 nt, Artificial Sequence
  Chemically synthesized
caacucauaggaggccugu

SEQ ID NO: 76759 - RNA, 19 nt, Artificial Sequence
  Chemically synthesized
cagguauuagaauuagcau

SEQ ID NO: 76760 - RNA, 19 nt, Artificial Sequence
  Chemically synthesized
agccaguguugaacccaaa

SEQ ID NO: 76761 - RNA, 19 nt, Artificial Sequence
  Chemically synthesized
ccaguagaacgugucaaua

SEQ ID NO: 76762 - RNA, 19 nt, Artificial Sequence
  Chemically synthesized
aggaauuccugguggaguu

SEQ ID NO: 76763 - RNA, 19 nt, Artificial Sequence
  Chemically synthesized
gaguucuuuggaaucaaua

SEQ ID NO: 76764 - RNA, 19 nt, Artificial Sequence
  Chemically synthesized
cagccaugagaguacuaau

SEQ ID NO: 76765 - RNA, 19 nt, Artificial Sequence
  Chemically synthesized
agagcuuuagguccacaga

SEQ ID NO: 76766 - RNA, 19 nt, Artificial Sequence
  Chemically synthesized
ccacagaagaacacgccaa

SEQ ID NO: 76767 - RNA, 19 nt, Artificial Sequence
  Chemically synthesized
ccuguaaucacgucaguau

SEQ ID NO: 76768 - RNA, 19 nt, Artificial Sequence
  Chemically synthesized
ucgucccaguguaaagcua

SEQ ID NO: 76769 - RNA, 19 nt, Artificial Sequence
  Chemically synthesized
gcuaugugaagagccugau

SEQ ID NO: 76770 - RNA, 19 nt, Artificial Sequence
  Chemically synthesized
caucccagccgguaagaaa

SEQ ID NO: 76771 - RNA, 19 nt, Artificial Sequence
  Chemically synthesized
guaagggcuucccuaguaa

SEQ ID NO: 76772 - RNA, 19 nt, Artificial Sequence
  Chemically synthesized
ugagaaagaagacgaugaa

SEQ ID NO: 76773 - RNA, 19 nt, Artificial Sequence
  Chemically synthesized
gaaagaagacgaugaaaac

SEQ ID NO: 76774 - RNA, 19 nt, Artificial Sequence
  Chemically synthesized
ugaaaacauggugugugua

SEQ ID NO: 76775 - RNA, 19 nt, Artificial Sequence
  Chemically synthesized
gcgaccaguuugugaaauc

SEQ ID NO: 76776 - RNA, 19 nt, Artificial Sequence
  Chemically synthesized
aacaggccgucacaggaau

SEQ ID NO: 76777 - RNA, 19 nt, Artificial Sequence
  Chemically synthesized
cugguggaguucuuuggaa

SEQ ID NO: 76778 - RNA, 19 nt, Artificial Sequence
  Chemically synthesized
gcuugaacucauuguucca

SEQ ID NO: 76779 - RNA, 19 nt, Artificial Sequence
  Chemically synthesized
cgucccaguguaaagcuau

SEQ ID NO: 76780 - RNA, 19 nt, Artificial Sequence
  Chemically synthesized
auacaucugucagggcagu

SEQ ID NO: 76781 - RNA, 21 nt, Artificial Sequence
  Chemically synthesized
cguggaggaggcaauuagaca

SEQ ID NO: 76782 - RNA, 21 nt, Artificial Sequence
  Chemically synthesized
caucguggcgcauuucuucaa

SEQ ID NO: 76783 - RNA, 21 nt, Artificial Sequence
  Chemically synthesized
ucccuucgcugcucuucugaa

SEQ ID NO: 76784 - RNA, 21 nt, Artificial Sequence
  Chemically synthesized
guugggaacuggugaauaaua

SEQ ID NO: 76785 - RNA, 21 nt, Artificial Sequence
  Chemically synthesized
augaaaaucaggcucuucaca

SEQ ID NO: 76786 - RNA, 21 nt, Artificial Sequence
  Chemically synthesized
uguagagaccgcuaugcagaa

SEQ ID NO: 76787 - RNA, 21 nt, Artificial Sequence
  Chemically synthesized
aaaaucaggcucuucacauag

SEQ ID NO: 76788 - RNA, 21 nt, Artificial Sequence
  Chemically synthesized
gauuguucgaggccaaaccca

SEQ ID NO: 76789 - RNA, 21 nt, Artificial Sequence
  Chemically synthesized
gcaugugaaagaauaauuagg

SEQ ID NO: 76790 - RNA, 21 nt, Artificial Sequence
  Chemically synthesized
ccuggaaacacggaugaguga

SEQ ID NO: 76791 - RNA, 21 nt, Artificial Sequence
  Chemically synthesized
guggaggaggcaauuagacaa

SEQ ID NO: 76792 - RNA, 21 nt, Artificial Sequence
  Chemically synthesized
acaacaaggagagcuucuaga

SEQ ID NO: 76793 - RNA, 21 nt, Artificial Sequence
  Chemically synthesized
uggauuugccgggaugcaaga

SEQ ID NO: 76794 - RNA, 21 nt, Artificial Sequence
  Chemically synthesized
uugggaacuggugaauaauaa

SEQ ID NO: 76795 - RNA, 21 nt, Artificial Sequence
  Chemically synthesized
auuagguucuggcgauuucaa

SEQ ID NO: 76796 - RNA, 21 nt, Artificial Sequence
  Chemically synthesized
cuuuccauuacacacgaguua

SEQ ID NO: 76797 - RNA, 21 nt, Artificial Sequence
  Chemically synthesized
aaaucaggcucuucacauagc

SEQ ID NO: 76798 - RNA, 21 nt, Artificial Sequence
  Chemically synthesized
cgugauuacaggcuuaaagca

SEQ ID NO: 76799 - RNA, 21 nt, Artificial Sequence
  Chemically synthesized
aaggaacccucggcuuggaaa

SEQ ID NO: 76800 - RNA, 21 nt, Artificial Sequence
  Chemically synthesized
ucuugaucaugaccucgucaa

SEQ ID NO: 76801 - RNA, 21 nt, Artificial Sequence
  Chemically synthesized
agcugagcaagguguauuucu

SEQ ID NO: 76802 - RNA, 21 nt, Artificial Sequence
  Chemically synthesized
aguccuggaacuucacaugaa

SEQ ID NO: 76803 - RNA, 21 nt, Artificial Sequence
  Chemically synthesized
acuucuggccgcacuuuccaa

SEQ ID NO: 76804 - RNA, 21 nt, Artificial Sequence
  Chemically synthesized
agcagaagaccuucuauggga

SEQ ID NO: 76805 - RNA, 21 nt, Artificial Sequence
  Chemically synthesized
ugauuacaggcuuaaagcaga

SEQ ID NO: 76806 - RNA, 21 nt, Artificial Sequence
  Chemically synthesized
uguggucuuguaugcauguga

SEQ ID NO: 76807 - RNA, 21 nt, Artificial Sequence
  Chemically synthesized
uacuagggaagcccuuacuaa

SEQ ID NO: 76808 - RNA, 21 nt, Artificial Sequence
  Chemically synthesized
ccuaugaguuguucugguaca

SEQ ID NO: 76809 - RNA, 21 nt, Artificial Sequence
  Chemically synthesized
uggcuuuagucuugaucauga

SEQ ID NO: 76810 - RNA, 21 nt, Artificial Sequence
  Chemically synthesized
guucuacugguaugaagagga

SEQ ID NO: 76811 - RNA, 21 nt, Artificial Sequence
  Chemically synthesized
aaaagaugugccacuuguauu

SEQ ID NO: 76812 - RNA, 21 nt, Artificial Sequence
  Chemically synthesized
gucuuguaugcaugugaaaga

SEQ ID NO: 76813 - RNA, 21 nt, Artificial Sequence
  Chemically synthesized
gucucucucugcacaacauca

SEQ ID NO: 76814 - RNA, 21 nt, Artificial Sequence
  Chemically synthesized
acaucguggcgcauuucuuca

SEQ ID NO: 76815 - RNA, 21 nt, Artificial Sequence
  Chemically synthesized
acaaaaaccucagauuucaca

SEQ ID NO: 76816 - RNA, 21 nt, Artificial Sequence
  Chemically synthesized
caggcauuguguuuucaauca

SEQ ID NO: 76817 - RNA, 21 nt, Artificial Sequence
  Chemically synthesized
ggugcuggauuuugaaugagg

SEQ ID NO: 76818 - RNA, 21 nt, Artificial Sequence
  Chemically synthesized
cuuuggaacugcccugacaga

SEQ ID NO: 76819 - RNA, 21 nt, Artificial Sequence
  Chemically synthesized
auuguucgaggccaaacccaa

SEQ ID NO: 76820 - RNA, 21 nt, Artificial Sequence
  Chemically synthesized
gaucaugaccucgucaacuga

SEQ ID NO: 76821 - RNA, 21 nt, Artificial Sequence
  Chemically synthesized
aaacuggucgccuaugggaua

SEQ ID NO: 76822 - RNA, 21 nt, Artificial Sequence
  Chemically synthesized
caugcuaauucuaauaccugu

SEQ ID NO: 76823 - RNA, 21 nt, Artificial Sequence
  Chemically synthesized
acacugggacgaaaauacuga

SEQ ID NO: 76824 - RNA, 21 nt, Artificial Sequence
  Chemically synthesized
ccaaagaacuccaccaggaau

SEQ ID NO: 76825 - RNA, 21 nt, Artificial Sequence
  Chemically synthesized
caagcagauugccuacaauca

SEQ ID NO: 76826 - RNA, 21 nt, Artificial Sequence
  Chemically synthesized
cuuuacacugggacgaaaaua

SEQ ID NO: 76827 - RNA, 21 nt, Artificial Sequence
  Chemically synthesized
cacuuuccaagcugggcaaca

SEQ ID NO: 76828 - RNA, 21 nt, Artificial Sequence
  Chemically synthesized
uauugacacguucuacuggua

SEQ ID NO: 76829 - RNA, 21 nt, Artificial Sequence
  Chemically synthesized
caaagaacuccaccaggaauu

SEQ ID NO: 76830 - RNA, 21 nt, Artificial Sequence
  Chemically synthesized
uccaaagaacuccaccaggaa

SEQ ID NO: 76831 - RNA, 21 nt, Artificial Sequence
  Chemically synthesized
acuggauuugccgggaugcaa

SEQ ID NO: 76832 - RNA, 21 nt, Artificial Sequence
  Chemically synthesized
cuguagagaccgcuaugcaga

SEQ ID NO: 76833 - RNA, 21 nt, Artificial Sequence
  Chemically synthesized
gguacacacaccauguuuuca

SEQ ID NO: 76834 - RNA, 21 nt, Artificial Sequence
  Chemically synthesized
caucagacaggccuccuauga

SEQ ID NO: 76835 - RNA, 21 nt, Artificial Sequence
  Chemically synthesized
cacugugccugaauuuuaacu

SEQ ID NO: 76836 - RNA, 21 nt, Artificial Sequence
  Chemically synthesized
gaacaguacacuauaccauac

SEQ ID NO: 76837 - RNA, 21 nt, Artificial Sequence
  Chemically synthesized
ucucauggcugggaauaaauu

SEQ ID NO: 76838 - RNA, 21 nt, Artificial Sequence
  Chemically synthesized
agacuuuggaggucaagucca

SEQ ID NO: 76839 - RNA, 21 nt, Artificial Sequence
  Chemically synthesized
cuggaguccuggaacuucaca

SEQ ID NO: 76840 - RNA, 21 nt, Artificial Sequence
  Chemically synthesized
uuccauuacacacgaguuauu

SEQ ID NO: 76841 - RNA, 21 nt, Artificial Sequence
  Chemically synthesized
cuacugguaugaagaggagga

SEQ ID NO: 76842 - RNA, 21 nt, Artificial Sequence
  Chemically synthesized
cauuucuauuacaacaaggag

SEQ ID NO: 76843 - RNA, 21 nt, Artificial Sequence
  Chemically synthesized
aaugagggucucuccaccaua

SEQ ID NO: 76844 - RNA, 21 nt, Artificial Sequence
  Chemically synthesized
agaauaauuagguucuggcga

SEQ ID NO: 76845 - RNA, 21 nt, Artificial Sequence
  Chemically synthesized
agcuguuaaugcaaccaucca

SEQ ID NO: 76846 - RNA, 21 nt, Artificial Sequence
  Chemically synthesized
augugccacuuguauucauca

SEQ ID NO: 76847 - RNA, 21 nt, Artificial Sequence
  Chemically synthesized
guucuggcgauuucaacaaga

SEQ ID NO: 76848 - RNA, 21 nt, Artificial Sequence
  Chemically synthesized
aacccucggcuuggaaaugga

SEQ ID NO: 76849 - RNA, 21 nt, Artificial Sequence
  Chemically synthesized
agaccgcuaugcagaauggca

SEQ ID NO: 76850 - RNA, 21 nt, Artificial Sequence
  Chemically synthesized
cacaacaucaccuucuguaga

SEQ ID NO: 76851 - RNA, 21 nt, Artificial Sequence
  Chemically synthesized
aagaaauuuccugacagccga

SEQ ID NO: 76852 - RNA, 21 nt, Artificial Sequence
  Chemically synthesized
acacguucuacugguaugaag

SEQ ID NO: 76853 - RNA, 21 nt, Artificial Sequence
  Chemically synthesized
uacacuauaccauacuuccuu

SEQ ID NO: 76854 - RNA, 21 nt, Artificial Sequence
  Chemically synthesized
aacacaaccacugaauugcua

SEQ ID NO: 76855 - RNA, 21 nt, Artificial Sequence
  Chemically synthesized
aacaguacacuauaccauacu

SEQ ID NO: 76856 - RNA, 21 nt, Artificial Sequence
  Chemically synthesized
uauugauuccaaagaacucca

SEQ ID NO: 76857 - RNA, 21 nt, Artificial Sequence
  Chemically synthesized
aguccaggcauuguguuuuca

SEQ ID NO: 76858 - RNA, 21 nt, Artificial Sequence
  Chemically synthesized
aguucaagcagauugccuaca

SEQ ID NO: 76859 - RNA, 21 nt, Artificial Sequence
  Chemically synthesized
cauauauuucuuaccggcugg

SEQ ID NO: 76860 - RNA, 21 nt, Artificial Sequence
  Chemically synthesized
agauguauuucacuacccagu

SEQ ID NO: 76861 - RNA, 21 nt, Artificial Sequence
  Chemically synthesized
gaauugcuaaggacaauagca

SEQ ID NO: 76862 - RNA, 21 nt, Artificial Sequence
  Chemically synthesized
agacacaggugagggagaaga

SEQ ID NO: 76863 - RNA, 21 nt, Artificial Sequence
  Chemically synthesized
caaacuggucgccuaugggau

SEQ ID NO: 76864 - RNA, 21 nt, Artificial Sequence
  Chemically synthesized
cuuaccggcugggaugaaaau

SEQ ID NO: 76865 - RNA, 21 nt, Artificial Sequence
  Chemically synthesized
ugaucucuuacucucccugga

SEQ ID NO: 76866 - RNA, 21 nt, Artificial Sequence
  Chemically synthesized
cuucgcugcucuucugaaauc

SEQ ID NO: 76867 - RNA, 21 nt, Artificial Sequence
  Chemically synthesized
cucuggaguccuggaacuuca

SEQ ID NO: 76868 - RNA, 21 nt, Artificial Sequence
  Chemically synthesized
uguucgaggccaaacccaaga

SEQ ID NO: 76869 - RNA, 21 nt, Artificial Sequence
  Chemically synthesized
ccucagauuucacaaacuggu

SEQ ID NO: 76870 - RNA, 21 nt, Artificial Sequence
  Chemically synthesized
cacugaagcugagcaaggugu

SEQ ID NO: 76871 - RNA, 21 nt, Artificial Sequence
  Chemically synthesized
uagguucuggcgauuucaaca

SEQ ID NO: 76872 - RNA, 21 nt, Artificial Sequence
  Chemically synthesized
uguuuauugacacguucuacu

SEQ ID NO: 76873 - RNA, 21 nt, Artificial Sequence
  Chemically synthesized
ugugacggccuguugauauga

SEQ ID NO: 76874 - RNA, 21 nt, Artificial Sequence
  Chemically synthesized
gucaaguccaggcauuguguu

SEQ ID NO: 76875 - RNA, 21 nt, Artificial Sequence
  Chemically synthesized
aauuagguucuggcgauuuca

SEQ ID NO: 76876 - RNA, 21 nt, Artificial Sequence
  Chemically synthesized
uuccugacagccgaagagcaa

SEQ ID NO: 76877 - RNA, 21 nt, Artificial Sequence
  Chemically synthesized
aaauuuccugacagccgaaga

SEQ ID NO: 76878 - RNA, 21 nt, Artificial Sequence
  Chemically synthesized
gaguuauuuuggguucaacac

SEQ ID NO: 76879 - RNA, 21 nt, Artificial Sequence
  Chemically synthesized
uuuccauuacacacgaguuau

SEQ ID NO: 76880 - RNA, 21 nt, Artificial Sequence
  Chemically synthesized
agucuuuccauuacacacgag

SEQ ID NO: 76881 - RNA, 21 nt, Artificial Sequence
  Chemically synthesized
aguauuggcguguucuucugu

SEQ ID NO: 76882 - RNA, 21 nt, Artificial Sequence
  Chemically synthesized
gcuuaaagcagaagaccuucu

SEQ ID NO: 76883 - RNA, 21 nt, Artificial Sequence
  Chemically synthesized
cacugggacgaaaauacugac

SEQ ID NO: 76884 - RNA, 21 nt, Artificial Sequence
  Chemically synthesized
aucaggcucuucacauagcuu

SEQ ID NO: 76885 - RNA, 21 nt, Artificial Sequence
  Chemically synthesized
gaguccuggaacuucacauga

SEQ ID NO: 76886 - RNA, 21 nt, Artificial Sequence
  Chemically synthesized
gacagccgaagagcaacaagu

SEQ ID NO: 76887 - RNA, 21 nt, Artificial Sequence
  Chemically synthesized
caucgucuucuuucucagccu

SEQ ID NO: 76888 - RNA, 21 nt, Artificial Sequence
  Chemically synthesized
acaaguauuugcugcagagga

SEQ ID NO: 76889 - RNA, 21 nt, Artificial Sequence
  Chemically synthesized
acuaacgacccaacauccaga

SEQ ID NO: 76890 - RNA, 21 nt, Artificial Sequence
  Chemically synthesized
ugaagaggaggagucuuucca

SEQ ID NO: 76891 - RNA, 21 nt, Artificial Sequence
  Chemically synthesized
caugucauauacaacagaaca

SEQ ID NO: 76892 - RNA, 21 nt, Artificial Sequence
  Chemically synthesized
ucucgaggacacuucaaaaga

SEQ ID NO: 76893 - RNA, 21 nt, Artificial Sequence
  Chemically synthesized
caggcuuaaagcagaagaccu

SEQ ID NO: 76894 - RNA, 21 nt, Artificial Sequence
  Chemically synthesized
ugcccugacagauguauuuca

SEQ ID NO: 76895 - RNA, 21 nt, Artificial Sequence
  Chemically synthesized
gaacugcccugacagauguau

SEQ ID NO: 76896 - RNA, 21 nt, Artificial Sequence
  Chemically synthesized
uaaaauggcgccagggcagua

SEQ ID NO: 76897 - RNA, 21 nt, Artificial Sequence
  Chemically synthesized
gauuuuaggcccuguggucuu

SEQ ID NO: 76898 - RNA, 21 nt, Artificial Sequence
  Chemically synthesized
uagggaagcccuuacuaacga

SEQ ID NO: 76899 - RNA, 21 nt, Artificial Sequence
  Chemically synthesized
cugggacgaaaauacugacgu

SEQ ID NO: 76900 - RNA, 21 nt, Artificial Sequence
  Chemically synthesized
uagcuuuacacugggacgaaa

SEQ ID NO: 76901 - RNA, 21 nt, Artificial Sequence
  Chemically synthesized
aucucuuacucucccuggaaa

SEQ ID NO: 76902 - RNA, 21 nt, Artificial Sequence
  Chemically synthesized
cuuuaaaauggcgccagggca

SEQ ID NO: 76903 - RNA, 21 nt, Artificial Sequence
  Chemically synthesized
uggaguccuggaacuucacau

SEQ ID NO: 76904 - RNA, 21 nt, Artificial Sequence
  Chemically synthesized
gaaauuuccugacagccgaag

SEQ ID NO: 76905 - RNA, 21 nt, Artificial Sequence
  Chemically synthesized
gaguuguucugguacacacac

SEQ ID NO: 76906 - RNA, 21 nt, Artificial Sequence
  Chemically synthesized
uuacuaacgacccaacaucca

SEQ ID NO: 76907 - RNA, 21 nt, Artificial Sequence
  Chemically synthesized
aggagucuuuccauuacacac

SEQ ID NO: 76908 - RNA, 21 nt, Artificial Sequence
  Chemically synthesized
auuccugugacggccuguuga

SEQ ID NO: 76909 - RNA, 21 nt, Artificial Sequence
  Chemically synthesized
aucauauauuucuuaccggcu

SEQ ID NO: 76910 - RNA, 21 nt, Artificial Sequence
  Chemically synthesized
cuggcgauuucaacaagaagu

SEQ ID NO: 76911 - RNA, 21 nt, Artificial Sequence
  Chemically synthesized
acaacaucaccuucuguagag

SEQ ID NO: 76912 - RNA, 21 nt, Artificial Sequence
  Chemically synthesized
aauuuacuagggaagcccuua

SEQ ID NO: 76913 - RNA, 21 nt, Artificial Sequence
  Chemically synthesized
ucuaauaccugucagucgaaa

SEQ ID NO: 76914 - RNA, 21 nt, Artificial Sequence
  Chemically synthesized
cugugacggccuguugauaug

SEQ ID NO: 76915 - RNA, 21 nt, Artificial Sequence
  Chemically synthesized
cugaagcugagcaagguguau

SEQ ID NO: 76916 - RNA, 21 nt, Artificial Sequence
  Chemically synthesized
guucaucagacaggccuccua

SEQ ID NO: 76917 - RNA, 21 nt, Artificial Sequence
  Chemically synthesized
gaucucucuggcuuuagucuu

SEQ ID NO: 76918 - RNA, 21 nt, Artificial Sequence
  Chemically synthesized
acaaacuggucgccuauggga

SEQ ID NO: 76919 - RNA, 21 nt, Artificial Sequence
  Chemically synthesized
gaggcaauuagacaaaaaccu

SEQ ID NO: 76920 - RNA, 21 nt, Artificial Sequence
  Chemically synthesized
aagcccuuacuaacgacccaa

SEQ ID NO: 76921 - RNA, 21 nt, Artificial Sequence
  Chemically synthesized
aucuguuuauugacacguucu

SEQ ID NO: 76922 - RNA, 21 nt, Artificial Sequence
  Chemically synthesized
gagagcuucuagacuuuggag

SEQ ID NO: 76923 - RNA, 21 nt, Artificial Sequence
  Chemically synthesized
agugguuugcugaucucuuac

SEQ ID NO: 76924 - RNA, 21 nt, Artificial Sequence
  Chemically synthesized
gagcaacaaguaucaugaugg

SEQ ID NO: 76925 - RNA, 21 nt, Artificial Sequence
  Chemically synthesized
ggucuuguaugcaugugaaag

SEQ ID NO: 76926 - RNA, 21 nt, Artificial Sequence
  Chemically synthesized
aagacagucucucucugcaca

SEQ ID NO: 76927 - RNA, 21 nt, Artificial Sequence
  Chemically synthesized
guuguucugguacacacacca

SEQ ID NO: 76928 - RNA, 21 nt, Artificial Sequence
  Chemically synthesized
gugacggccuguugauaugag

SEQ ID NO: 76929 - RNA, 21 nt, Artificial Sequence
  Chemically synthesized
caguauuggcguguucuucug

SEQ ID NO: 76930 - RNA, 21 nt, Artificial Sequence
  Chemically synthesized
gugguuugcugaucucuuacu

SEQ ID NO: 76931 - RNA, 21 nt, Artificial Sequence
  Chemically synthesized
cuauaugguacaaaugcagug

SEQ ID NO: 76932 - RNA, 21 nt, Artificial Sequence
  Chemically synthesized
uuagguucuggcgauuucaac

SEQ ID NO: 76933 - RNA, 21 nt, Artificial Sequence
  Chemically synthesized
uucuguagagaccgcuaugca

SEQ ID NO: 76934 - RNA, 21 nt, Artificial Sequence
  Chemically synthesized
cucugcacaacaucaccuucu

SEQ ID NO: 76935 - RNA, 21 nt, Artificial Sequence
  Chemically synthesized
cauccgcacugugccugaauu

SEQ ID NO: 76936 - RNA, 21 nt, Artificial Sequence
  Chemically synthesized
auuacaacaaggagagcuucu

SEQ ID NO: 76937 - RNA, 21 nt, Artificial Sequence
  Chemically synthesized
auuggcguguucuucugugga

SEQ ID NO: 76938 - RNA, 21 nt, Artificial Sequence
  Chemically synthesized
uuacaggcuuaaagcagaaga

SEQ ID NO: 76939 - RNA, 21 nt, Artificial Sequence
  Chemically synthesized
gacgugauuacaggcuuaaag

SEQ ID NO: 76940 - RNA, 21 nt, Artificial Sequence
  Chemically synthesized
augagggucucuccaccauau

SEQ ID NO: 76941 - RNA, 21 nt, Artificial Sequence
  Chemically synthesized
auuucuuaccggcugggauga

SEQ ID NO: 76942 - RNA, 21 nt, Artificial Sequence
  Chemically synthesized
ucuauaugguacaaaugcagu

SEQ ID NO: 76943 - RNA, 21 nt, Artificial Sequence
  Chemically synthesized
ccuccuaugaguuguucuggu

SEQ ID NO: 76944 - RNA, 21 nt, Artificial Sequence
  Chemically synthesized
ucuggcuuuagucuugaucau

SEQ ID NO: 76945 - RNA, 21 nt, Artificial Sequence
  Chemically synthesized
ugaucucucuggcuuuagucu

SEQ ID NO: 76946 - RNA, 21 nt, Artificial Sequence
  Chemically synthesized
aggugagggagaagaaauuuc

SEQ ID NO: 76947 - RNA, 21 nt, Artificial Sequence
  Chemically synthesized
gucuggugaucucucuggcuu

SEQ ID NO: 76948 - RNA, 21 nt, Artificial Sequence
  Chemically synthesized
aagaggaggagucuuuccauu

SEQ ID NO: 76949 - RNA, 21 nt, Artificial Sequence
  Chemically synthesized
auugacacguucuacugguau

SEQ ID NO: 76950 - RNA, 21 nt, Artificial Sequence
  Chemically synthesized
guacacuauaccauacuuccu

SEQ ID NO: 76951 - RNA, 21 nt, Artificial Sequence
  Chemically synthesized
aggagagcuucuagacuuugg

SEQ ID NO: 76952 - RNA, 21 nt, Artificial Sequence
  Chemically synthesized
uuacaacaaggagagcuucua

SEQ ID NO: 76953 - RNA, 21 nt, Artificial Sequence
  Chemically synthesized
cuggaacaaugaguucaagca

SEQ ID NO: 76954 - RNA, 21 nt, Artificial Sequence
  Chemically synthesized
agagcaacaaguaucaugaug

SEQ ID NO: 76955 - RNA, 21 nt, Artificial Sequence
  Chemically synthesized
gcuuggaaauggauuuuaggc

SEQ ID NO: 76956 - RNA, 21 nt, Artificial Sequence
  Chemically synthesized
ucgucuucuuucucagccugg

SEQ ID NO: 76957 - RNA, 21 nt, Artificial Sequence
  Chemically synthesized
ucucucuggcuuuagucuuga

SEQ ID NO: 76958 - RNA, 21 nt, Artificial Sequence
  Chemically synthesized
ccuaacgagagcuaccucaac

SEQ ID NO: 76959 - RNA, 21 nt, Artificial Sequence
  Chemically synthesized
gaggaggagucuuuccauuac

SEQ ID NO: 76960 - RNA, 21 nt, Artificial Sequence
  Chemically synthesized
acguucuacugguaugaagag

SEQ ID NO: 76961 - RNA, 21 nt, Artificial Sequence
  Chemically synthesized
acuagggaagcccuuacuaac

SEQ ID NO: 76962 - RNA, 21 nt, Artificial Sequence
  Chemically synthesized
aaaauacugacgugauuacag

SEQ ID NO: 76963 - RNA, 21 nt, Artificial Sequence
  Chemically synthesized
aaucaggcucuucacauagcu

SEQ ID NO: 76964 - RNA, 21 nt, Artificial Sequence
  Chemically synthesized
ucauauauuucuuaccggcug

SEQ ID NO: 76965 - RNA, 21 nt, Artificial Sequence
  Chemically synthesized
ugguacaaaugcagugaggca

SEQ ID NO: 76966 - RNA, 21 nt, Artificial Sequence
  Chemically synthesized
uugucauuaccaaggugguaa

SEQ ID NO: 76967 - RNA, 21 nt, Artificial Sequence
  Chemically synthesized
aacaagaaguugucauuacca

SEQ ID NO: 76968 - RNA, 21 nt, Artificial Sequence
  Chemically synthesized
gaagaaauuuccugacagccg

SEQ ID NO: 76969 - RNA, 21 nt, Artificial Sequence
  Chemically synthesized
acugguaugaagaggaggagu

SEQ ID NO: 76970 - RNA, 21 nt, Artificial Sequence
  Chemically synthesized
ugugaacaguacacuauacca

SEQ ID NO: 76971 - RNA, 21 nt, Artificial Sequence
  Chemically synthesized
uacucucauggcugggaauaa

SEQ ID NO: 76972 - RNA, 21 nt, Artificial Sequence
  Chemically synthesized
ucuauuacaacaaggagagcu

SEQ ID NO: 76973 - RNA, 21 nt, Artificial Sequence
  Chemically synthesized
gugauuacaggcuuaaagcag

SEQ ID NO: 76974 - RNA, 21 nt, Artificial Sequence
  Chemically synthesized
cauagcuuuacacugggacga

SEQ ID NO: 76975 - RNA, 21 nt, Artificial Sequence
  Chemically synthesized
aagacuuuuucagcgugcaca

SEQ ID NO: 76976 - RNA, 21 nt, Artificial Sequence
  Chemically synthesized
cauuaccaaggugguaagcca

SEQ ID NO: 76977 - RNA, 21 nt, Artificial Sequence
  Chemically synthesized
uuuaggcccuguggucuugua

SEQ ID NO: 76978 - RNA, 21 nt, Artificial Sequence
  Chemically synthesized
uuuucaucgucuucuuucuca

SEQ ID NO: 76979 - RNA, 21 nt, Artificial Sequence
  Chemically synthesized
uguucugguacacacaccaug

SEQ ID NO: 76980 - RNA, 21 nt, Artificial Sequence
  Chemically synthesized
cauccacaucguggcgcauuu

SEQ ID NO: 76981 - RNA, 21 nt, Artificial Sequence
  Chemically synthesized
gauaugagcucccaguuggga

SEQ ID NO: 76982 - RNA, 21 nt, Artificial Sequence
  Chemically synthesized
uccugugacggccuguugaua

SEQ ID NO: 76983 - RNA, 21 nt, Artificial Sequence
  Chemically synthesized
uuccugugacggccuguugau

SEQ ID NO: 76984 - RNA, 21 nt, Artificial Sequence
  Chemically synthesized
uuucuauuacaacaaggagag

SEQ ID NO: 76985 - RNA, 21 nt, Artificial Sequence
  Chemically synthesized
ucuggaguccuggaacuucac

SEQ ID NO: 76986 - RNA, 21 nt, Artificial Sequence
  Chemically synthesized
gauuucaacaagaaguuguca

SEQ ID NO: 76987 - RNA, 21 nt, Artificial Sequence
  Chemically synthesized
acucucauggcugggaauaaa

SEQ ID NO: 76988 - RNA, 21 nt, Artificial Sequence
  Chemically synthesized
cauauuaguacucucauggcu

SEQ ID NO: 76989 - RNA, 21 nt, Artificial Sequence
  Chemically synthesized
cuggaaacacggaugagugag

SEQ ID NO: 76990 - RNA, 21 nt, Artificial Sequence
  Chemically synthesized
ucucccuggaaacacggauga

SEQ ID NO: 76991 - RNA, 21 nt, Artificial Sequence
  Chemically synthesized
ugagcaagguguauuucuacu

SEQ ID NO: 76992 - RNA, 21 nt, Artificial Sequence
  Chemically synthesized
cugaguucaucagacaggccu

SEQ ID NO: 76993 - RNA, 21 nt, Artificial Sequence
  Chemically synthesized
ucaugaccucgucaacugagu

SEQ ID NO: 76994 - RNA, 21 nt, Artificial Sequence
  Chemically synthesized
ugaucaugaccucgucaacug

SEQ ID NO: 76995 - RNA, 21 nt, Artificial Sequence
  Chemically synthesized
ggagucuuuccauuacacacg

SEQ ID NO: 76996 - RNA, 21 nt, Artificial Sequence
  Chemically synthesized
gaagcccuuacuaacgaccca

SEQ ID NO: 76997 - RNA, 21 nt, Artificial Sequence
  Chemically synthesized
aaagcucucucgaggacacuu

SEQ ID NO: 76998 - RNA, 21 nt, Artificial Sequence
  Chemically synthesized
uuuggaacugcccugacagau

SEQ ID NO: 76999 - RNA, 21 nt, Artificial Sequence
  Chemically synthesized
aggccaaacccaagacagucu

SEQ ID NO: 77000 - RNA, 21 nt, Artificial Sequence
  Chemically synthesized
caacugaguucaucagacagg

SEQ ID NO: 77001 - RNA, 21 nt, Artificial Sequence
  Chemically synthesized
uaauuuacuagggaagcccuu

SEQ ID NO: 77002 - RNA, 21 nt, Artificial Sequence
  Chemically synthesized
cauuacacacgaguuauuuug

SEQ ID NO: 77003 - RNA, 21 nt, Artificial Sequence
  Chemically synthesized
cugguaugaagaggaggaguc

SEQ ID NO: 77004 - RNA, 21 nt, Artificial Sequence
  Chemically synthesized
cguucuacugguaugaagagg

SEQ ID NO: 77005 - RNA, 21 nt, Artificial Sequence
  Chemically synthesized
uaccauacuuccuuagcuuau

SEQ ID NO: 77006 - RNA, 21 nt, Artificial Sequence
  Chemically synthesized
gacuuuggaggucaaguccag

SEQ ID NO: 77007 - RNA, 21 nt, Artificial Sequence
  Chemically synthesized
uaaagcucucucgaggacacu

SEQ ID NO: 77008 - RNA, 21 nt, Artificial Sequence
  Chemically synthesized
agggucucuccaccauauuag

SEQ ID NO: 77009 - RNA, 21 nt, Artificial Sequence
  Chemically synthesized
uacacugggacgaaaauacug

SEQ ID NO: 77010 - RNA, 21 nt, Artificial Sequence
  Chemically synthesized
uuuugaaugagggucucucca

SEQ ID NO: 77011 - RNA, 21 nt, Artificial Sequence
  Chemically synthesized
caaaugcagugaggcacagac

SEQ ID NO: 77012 - RNA, 21 nt, Artificial Sequence
  Chemically synthesized
aauaauuagguucuggcgauu

SEQ ID NO: 77013 - RNA, 21 nt, Artificial Sequence
  Chemically synthesized
aaagaauaauuagguucuggc

SEQ ID NO: 77014 - RNA, 21 nt, Artificial Sequence
  Chemically synthesized
uagagaccgcuaugcagaaug

SEQ ID NO: 77015 - RNA, 21 nt, Artificial Sequence
  Chemically synthesized
agucucucucugcacaacauc

SEQ ID NO: 77016 - RNA, 21 nt, Artificial Sequence
  Chemically synthesized
agacaggccuccuaugaguug

SEQ ID NO: 77017 - RNA, 21 nt, Artificial Sequence
  Chemically synthesized
cgucaacugaguucaucagac

SEQ ID NO: 77018 - RNA, 21 nt, Artificial Sequence
  Chemically synthesized
uagucuugaucaugaccucgu

SEQ ID NO: 77019 - RNA, 21 nt, Artificial Sequence
  Chemically synthesized
auuucacaaacuggucgccua

SEQ ID NO: 77020 - RNA, 21 nt, Artificial Sequence
  Chemically synthesized
auaccugucagucgaaaccuu

SEQ ID NO: 77021 - RNA, 21 nt, Artificial Sequence
  Chemically synthesized
uacuaacgacccaacauccag

SEQ ID NO: 77022 - RNA, 21 nt, Artificial Sequence
  Chemically synthesized
aguuauuuuggguucaacacu

SEQ ID NO: 77023 - RNA, 21 nt, Artificial Sequence
  Chemically synthesized
ugacggccuguugauaugagc

SEQ ID NO: 77024 - RNA, 21 nt, Artificial Sequence
  Chemically synthesized
agaacuccaccaggaauuccu

SEQ ID NO: 77025 - RNA, 21 nt, Artificial Sequence
  Chemically synthesized
agagcuucuagacuuuggagg

SEQ ID NO: 77026 - RNA, 21 nt, Artificial Sequence
  Chemically synthesized
acuggaacaaugaguucaagc

SEQ ID NO: 77027 - RNA, 21 nt, Artificial Sequence
  Chemically synthesized
uuucuuaccggcugggaugaa

SEQ ID NO: 77028 - RNA, 21 nt, Artificial Sequence
  Chemically synthesized
uaucauauauuucuuaccggc

SEQ ID NO: 77029 - RNA, 21 nt, Artificial Sequence
  Chemically synthesized
uuuugagugguuugcugaucu

SEQ ID NO: 77030 - RNA, 21 nt, Artificial Sequence
  Chemically synthesized
gaugcaagagcuuuugagugg

SEQ ID NO: 77031 - RNA, 21 nt, Artificial Sequence
  Chemically synthesized
cauaucuucgcuggaguggca

SEQ ID NO: 77032 - RNA, 21 nt, Artificial Sequence
  Chemically synthesized
ucaucagacaggccuccuaug

SEQ ID NO: 77033 - RNA, 21 nt, Artificial Sequence
  Chemically synthesized
aguucaucagacaggccuccu

SEQ ID NO: 77034 - RNA, 21 nt, Artificial Sequence
  Chemically synthesized
uaacgacccaacauccagaca

SEQ ID NO: 77035 - RNA, 21 nt, Artificial Sequence
  Chemically synthesized
auucuaauaccugucagucga

SEQ ID NO: 77036 - RNA, 21 nt, Artificial Sequence
  Chemically synthesized
cuguugauaugagcucccagu

SEQ ID NO: 77037 - RNA, 21 nt, Artificial Sequence
  Chemically synthesized
gaauuccugugacggccuguu

SEQ ID NO: 77038 - RNA, 21 nt, Artificial Sequence
  Chemically synthesized
gaggucaaguccaggcauugu

SEQ ID NO: 77039 - RNA, 21 nt, Artificial Sequence
  Chemically synthesized
guauuggcguguucuucugug

SEQ ID NO: 77040 - RNA, 21 nt, Artificial Sequence
  Chemically synthesized
cagaagaccuucuaugggagg

SEQ ID NO: 77041 - RNA, 21 nt, Artificial Sequence
  Chemically synthesized
auauuucuuaccggcugggau

SEQ ID NO: 77042 - RNA, 21 nt, Artificial Sequence
  Chemically synthesized
gacagauguauuucacuaccc

SEQ ID NO: 77043 - RNA, 21 nt, Artificial Sequence
  Chemically synthesized
uggaacugcccugacagaugu

SEQ ID NO: 77044 - RNA, 21 nt, Artificial Sequence
  Chemically synthesized
aguugucauuaccaagguggu

SEQ ID NO: 77045 - RNA, 21 nt, Artificial Sequence
  Chemically synthesized
uaaggacaauagcaggcguca

SEQ ID NO: 77046 - RNA, 21 nt, Artificial Sequence
  Chemically synthesized
ucaaccuggaacgcuaccacu

SEQ ID NO: 77047 - RNA, 21 nt, Artificial Sequence
  Chemically synthesized
cuagggaagcccuuacuaacg

SEQ ID NO: 77048 - RNA, 21 nt, Artificial Sequence
  Chemically synthesized
cuucuguggaccuaaagcucu

SEQ ID NO: 77049 - RNA, 21 nt, Artificial Sequence
  Chemically synthesized
aggcccaacuggaacaaugag

SEQ ID NO: 77050 - RNA, 21 nt, Artificial Sequence
  Chemically synthesized
auuacaggcuuaaagcagaag

SEQ ID NO: 77051 - RNA, 21 nt, Artificial Sequence
  Chemically synthesized
uaccggcugggaugaaaauca

SEQ ID NO: 77052 - RNA, 21 nt, Artificial Sequence
  Chemically synthesized
uacucucccuggaaacacgga

SEQ ID NO: 77053 - RNA, 21 nt, Artificial Sequence
  Chemically synthesized
auaugguacaaaugcagugag

SEQ ID NO: 77054 - RNA, 21 nt, Artificial Sequence
  Chemically synthesized
auuucacuacccagugugugu

SEQ ID NO: 77055 - RNA, 21 nt, Artificial Sequence
  Chemically synthesized
agccgaagagcaacaaguauc

SEQ ID NO: 77056 - RNA, 21 nt, Artificial Sequence
  Chemically synthesized
uuuccugacagccgaagagca

SEQ ID NO: 77057 - RNA, 21 nt, Artificial Sequence
  Chemically synthesized
uccacaucguggcgcauuucu

SEQ ID NO: 77058 - RNA, 21 nt, Artificial Sequence
  Chemically synthesized
guugauaugagcucccaguug

SEQ ID NO: 77059 - RNA, 21 nt, Artificial Sequence
  Chemically synthesized
uuacacugggacgaaaauacu

SEQ ID NO: 77060 - RNA, 21 nt, Artificial Sequence
  Chemically synthesized
ucuacuggauuugccgggaug

SEQ ID NO: 77061 - RNA, 21 nt, Artificial Sequence
  Chemically synthesized
aacugcccugacagauguauu

SEQ ID NO: 77062 - RNA, 21 nt, Artificial Sequence
  Chemically synthesized
guucugguacacacaccaugu

SEQ ID NO: 77063 - RNA, 21 nt, Artificial Sequence
  Chemically synthesized
uaugaguuguucugguacaca

SEQ ID NO: 77064 - RNA, 21 nt, Artificial Sequence
  Chemically synthesized
gcuguuaaugcaaccauccac

SEQ ID NO: 77065 - RNA, 21 nt, Artificial Sequence
  Chemically synthesized
ugggauagcuguuaaugcaac

SEQ ID NO: 77066 - RNA, 21 nt, Artificial Sequence
  Chemically synthesized
uaugggauagcuguuaaugca

SEQ ID NO: 77067 - RNA, 21 nt, Artificial Sequence
  Chemically synthesized
auaagaggaacaaguauuugc

SEQ ID NO: 77068 - RNA, 21 nt, Artificial Sequence
  Chemically synthesized
ugugccugaauuuuaacugca

SEQ ID NO: 77069 - RNA, 21 nt, Artificial Sequence
  Chemically synthesized
uacacacgaguuauuuugggu

SEQ ID NO: 77070 - RNA, 21 nt, Artificial Sequence
  Chemically synthesized
uuauugacacguucuacuggu

SEQ ID NO: 77071 - RNA, 21 nt, Artificial Sequence
  Chemically synthesized
aaggagagcuucuagacuuug

SEQ ID NO: 77072 - RNA, 21 nt, Artificial Sequence
  Chemically synthesized
aagaugugccacuuguauuca

SEQ ID NO: 77073 - RNA, 21 nt, Artificial Sequence
  Chemically synthesized
cacuucaaaagaugugccacu

SEQ ID NO: 77074 - RNA, 21 nt, Artificial Sequence
  Chemically synthesized
cguggcuuuaaaauggcgcca

SEQ ID NO: 77075 - RNA, 21 nt, Artificial Sequence
  Chemically synthesized
ucuggcgauuucaacaagaag

SEQ ID NO: 77076 - RNA, 21 nt, Artificial Sequence
  Chemically synthesized
auggauuuuaggcccuguggu

SEQ ID NO: 77077 - RNA, 21 nt, Artificial Sequence
  Chemically synthesized
aauggcagacaguggcccaau

SEQ ID NO: 77078 - RNA, 21 nt, Artificial Sequence
  Chemically synthesized
cacacaccauguuuucaucgu

SEQ ID NO: 77079 - RNA, 21 nt, Artificial Sequence
  Chemically synthesized
uucugguacacacaccauguu

SEQ ID NO: 77080 - RNA, 21 nt, Artificial Sequence
  Chemically synthesized
cuaacgacccaacauccagac

SEQ ID NO: 77081 - RNA, 21 nt, Artificial Sequence
  Chemically synthesized
guuauuuuggguucaacacug

SEQ ID NO: 77082 - RNA, 21 nt, Artificial Sequence
  Chemically synthesized
guuuauugacacguucuacug

SEQ ID NO: 77083 - RNA, 21 nt, Artificial Sequence
  Chemically synthesized
ugauaugagcucccaguuggg

SEQ ID NO: 77084 - RNA, 21 nt, Artificial Sequence
  Chemically synthesized
uuccaaagaacuccaccagga

SEQ ID NO: 77085 - RNA, 21 nt, Artificial Sequence
  Chemically synthesized
ugauuccaaagaacuccacca

SEQ ID NO: 77086 - RNA, 21 nt, Artificial Sequence
  Chemically synthesized
aggucaaguccaggcauugug

SEQ ID NO: 77087 - RNA, 21 nt, Artificial Sequence
  Chemically synthesized
cucucgaggacacuucaaaag

SEQ ID NO: 77088 - RNA, 21 nt, Artificial Sequence
  Chemically synthesized
cuaaagcucucucgaggacac

SEQ ID NO: 77089 - RNA, 21 nt, Artificial Sequence
  Chemically synthesized
cucuuacucucccuggaaaca

SEQ ID NO: 77090 - RNA, 21 nt, Artificial Sequence
  Chemically synthesized
guuugcugaucucuuacucuc

SEQ ID NO: 77091 - RNA, 21 nt, Artificial Sequence
  Chemically synthesized
uguauuucacuacccagugug

SEQ ID NO: 77092 - RNA, 21 nt, Artificial Sequence
  Chemically synthesized
uuaaaauggcgccagggcagu

SEQ ID NO: 77093 - RNA, 21 nt, Artificial Sequence
  Chemically synthesized
aaauggauuuuaggcccugug

SEQ ID NO: 77094 - RNA, 21 nt, Artificial Sequence
  Chemically synthesized
acugcaugcuaauucuaauac

SEQ ID NO: 77095 - RNA, 21 nt, Artificial Sequence
  Chemically synthesized
aguacacuauaccauacuucc

SEQ ID NO: 77096 - RNA, 21 nt, Artificial Sequence
  Chemically synthesized
uuuggaggucaaguccaggca

SEQ ID NO: 77097 - RNA, 21 nt, Artificial Sequence
  Chemically synthesized
uacugacgugauuacaggcuu

SEQ ID NO: 77098 - RNA, 21 nt, Artificial Sequence
  Chemically synthesized
gcuggauuuugaaugaggguc

SEQ ID NO: 77099 - RNA, 21 nt, Artificial Sequence
  Chemically synthesized
gcucuucugaaaucuauaugg

SEQ ID NO: 77100 - RNA, 21 nt, Artificial Sequence
  Chemically synthesized
ugucauuaccaaggugguaag

SEQ ID NO: 77101 - RNA, 21 nt, Artificial Sequence
  Chemically synthesized
auguuuucaucgucuucuuuc

SEQ ID NO: 77102 - RNA, 21 nt, Artificial Sequence
  Chemically synthesized
cuucaaccuggaacgcuacca

SEQ ID NO: 77103 - RNA, 21 nt, Artificial Sequence
  Chemically synthesized
uuucuucaaccuggaacgcua

SEQ ID NO: 77104 - RNA, 21 nt, Artificial Sequence
  Chemically synthesized
auuucuucaaccuggaacgcu

SEQ ID NO: 77105 - RNA, 21 nt, Artificial Sequence
  Chemically synthesized
aguauuugcugcagaggaccg

SEQ ID NO: 77106 - RNA, 21 nt, Artificial Sequence
  Chemically synthesized
uauuuuggguucaacacuggc

SEQ ID NO: 77107 - RNA, 21 nt, Artificial Sequence
  Chemically synthesized
ucuacugguaugaagaggagg

SEQ ID NO: 77108 - RNA, 21 nt, Artificial Sequence
  Chemically synthesized
gacggccuguugauaugagcu

SEQ ID NO: 77109 - RNA, 21 nt, Artificial Sequence
  Chemically synthesized
uuaguacucucauggcuggga

SEQ ID NO: 77110 - RNA, 21 nt, Artificial Sequence
  Chemically synthesized
aacaaggagagcuucuagacu

SEQ ID NO: 77111 - RNA, 21 nt, Artificial Sequence
  Chemically synthesized
cacuuguauucaucagcugac

SEQ ID NO: 77112 - RNA, 21 nt, Artificial Sequence
  Chemically synthesized
caaugaguucaagcagauugc

SEQ ID NO: 77113 - RNA, 21 nt, Artificial Sequence
  Chemically synthesized
gugcuggauuuugaaugaggg

SEQ ID NO: 77114 - RNA, 21 nt, Artificial Sequence
  Chemically synthesized
guugucauuaccaagguggua

SEQ ID NO: 77115 - RNA, 21 nt, Artificial Sequence
  Chemically synthesized
ucuguagagaccgcuaugcag

SEQ ID NO: 77116 - RNA, 21 nt, Artificial Sequence
  Chemically synthesized
uuucucagccuggccauccau

SEQ ID NO: 77117 - RNA, 21 nt, Artificial Sequence
  Chemically synthesized
gacaggccuccuaugaguugu

SEQ ID NO: 77118 - RNA, 21 nt, Artificial Sequence
  Chemically synthesized
aucagacaggccuccuaugag

SEQ ID NO: 77119 - RNA, 21 nt, Artificial Sequence
  Chemically synthesized
ugagggagaagaaauuuccug

SEQ ID NO: 77120 - RNA, 21 nt, Artificial Sequence
  Chemically synthesized
gcuuuagucuugaucaugacc

SEQ ID NO: 77121 - RNA, 21 nt, Artificial Sequence
  Chemically synthesized
cacaucguggcgcauuucuuc

SEQ ID NO: 77122 - RNA, 21 nt, Artificial Sequence
  Chemically synthesized
auauuaguacucucauggcug

SEQ ID NO: 77123 - RNA, 21 nt, Artificial Sequence
  Chemically synthesized
ugugccacuuguauucaucag

SEQ ID NO: 77124 - RNA, 21 nt, Artificial Sequence
  Chemically synthesized
augaguucaagcagauugccu

SEQ ID NO: 77125 - RNA, 21 nt, Artificial Sequence
  Chemically synthesized
gucucuccaccauauuaguac

SEQ ID NO: 77126 - RNA, 21 nt, Artificial Sequence
  Chemically synthesized
uaaagcagaagaccuucuaug

SEQ ID NO: 77127 - RNA, 21 nt, Artificial Sequence
  Chemically synthesized
uuuuaggcccuguggucuugu

SEQ ID NO: 77128 - RNA, 21 nt, Artificial Sequence
  Chemically synthesized
ucucucugcacaacaucaccu

SEQ ID NO: 77129 - RNA, 21 nt, Artificial Sequence
  Chemically synthesized
uuguucgaggccaaacccaag

SEQ ID NO: 77130 - RNA, 21 nt, Artificial Sequence
  Chemically synthesized
aaccacugaauugcuaaggac

SEQ ID NO: 77131 - RNA, 21 nt, Artificial Sequence
  Chemically synthesized
aaugcaaccauccacaucgug

SEQ ID NO: 77132 - RNA, 21 nt, Artificial Sequence
  Chemically synthesized
accucagauuucacaaacugg

SEQ ID NO: 77133 - RNA, 21 nt, Artificial Sequence
  Chemically synthesized
cauaagaggaacaaguauuug

SEQ ID NO: 77134 - RNA, 21 nt, Artificial Sequence
  Chemically synthesized
ucauucauaagaggaacaagu

SEQ ID NO: 77135 - RNA, 21 nt, Artificial Sequence
  Chemically synthesized
aacuccaccaggaauuccugu

SEQ ID NO: 77136 - RNA, 21 nt, Artificial Sequence
  Chemically synthesized
cuguggaccuaaagcucucuc

SEQ ID NO: 77137 - RNA, 21 nt, Artificial Sequence
  Chemically synthesized
uauauuucuuaccggcuggga

SEQ ID NO: 77138 - RNA, 21 nt, Artificial Sequence
  Chemically synthesized
uggaaacacggaugagugagc

SEQ ID NO: 77139 - RNA, 21 nt, Artificial Sequence
  Chemically synthesized
uacuggauuugccgggaugca

SEQ ID NO: 77140 - RNA, 21 nt, Artificial Sequence
  Chemically synthesized
gguacaaaugcagugaggcac

SEQ ID NO: 77141 - RNA, 21 nt, Artificial Sequence
  Chemically synthesized
uuuaaaauggcgccagggcag

SEQ ID NO: 77142 - RNA, 21 nt, Artificial Sequence
  Chemically synthesized
ucagacaggccuccuaugagu

SEQ ID NO: 77143 - RNA, 21 nt, Artificial Sequence
  Chemically synthesized
cuugaucaugaccucgucaac

SEQ ID NO: 77144 - RNA, 21 nt, Artificial Sequence
  Chemically synthesized
gugagggagaagaaauuuccu

SEQ ID NO: 77145 - RNA, 21 nt, Artificial Sequence
  Chemically synthesized
cuuuagucuugaucaugaccu

SEQ ID NO: 77146 - RNA, 21 nt, Artificial Sequence
  Chemically synthesized
uuucacaaacuggucgccuau

SEQ ID NO: 77147 - RNA, 21 nt, Artificial Sequence
  Chemically synthesized
guauuugcugcagaggaccgu

SEQ ID NO: 77148 - RNA, 21 nt, Artificial Sequence
  Chemically synthesized
aaguauuugcugcagaggacc

SEQ ID NO: 77149 - RNA, 21 nt, Artificial Sequence
  Chemically synthesized
cugcaugcuaauucuaauacc

SEQ ID NO: 77150 - RNA, 21 nt, Artificial Sequence
  Chemically synthesized
uugugaacaguacacuauacc

SEQ ID NO: 77151 - RNA, 21 nt, Artificial Sequence
  Chemically synthesized
gaggacacuucaaaagaugug

SEQ ID NO: 77152 - RNA, 21 nt, Artificial Sequence
  Chemically synthesized
uggaccuaaagcucucucgag

SEQ ID NO: 77153 - RNA, 21 nt, Artificial Sequence
  Chemically synthesized
acgugauuacaggcuuaaagc

SEQ ID NO: 77154 - RNA, 21 nt, Artificial Sequence
  Chemically synthesized
uuuacacugggacgaaaauac

SEQ ID NO: 77155 - RNA, 21 nt, Artificial Sequence
  Chemically synthesized
gcugggaugaaaaucaggcuc

SEQ ID NO: 77156 - RNA, 21 nt, Artificial Sequence
  Chemically synthesized
uuugccgggaugcaagagcuu

SEQ ID NO: 77157 - RNA, 21 nt, Artificial Sequence
  Chemically synthesized
uaugguacaaaugcagugagg

SEQ ID NO: 77158 - RNA, 21 nt, Artificial Sequence
  Chemically synthesized
cuucugaaaucuauaugguac

SEQ ID NO: 77159 - RNA, 21 nt, Artificial Sequence
  Chemically synthesized
aacccaagacagucucucucu

SEQ ID NO: 77160 - RNA, 21 nt, Artificial Sequence
  Chemically synthesized
cacaaccacugaauugcuaag

SEQ ID NO: 77161 - RNA, 21 nt, Artificial Sequence
  Chemically synthesized
acccaacauccagacacaggu

SEQ ID NO: 77162 - RNA, 21 nt, Artificial Sequence
  Chemically synthesized
ccuuacuaacgacccaacauc

SEQ ID NO: 77163 - RNA, 21 nt, Artificial Sequence
  Chemically synthesized
uuauuuuggguucaacacugg

SEQ ID NO: 77164 - RNA, 21 nt, Artificial Sequence
  Chemically synthesized
uauaccauacuuccuuagcuu

SEQ ID NO: 77165 - RNA, 21 nt, Artificial Sequence
  Chemically synthesized
ucuagacuuuggaggucaagu

SEQ ID NO: 77166 - RNA, 21 nt, Artificial Sequence
  Chemically synthesized
accuaaagcucucucgaggac

SEQ ID NO: 77167 - RNA, 21 nt, Artificial Sequence
  Chemically synthesized
acaaugaguucaagcagauug

SEQ ID NO: 77168 - RNA, 21 nt, Artificial Sequence
  Chemically synthesized
aauacugacgugauuacaggc

SEQ ID NO: 77169 - RNA, 21 nt, Artificial Sequence
  Chemically synthesized
uucuuaccggcugggaugaaa

SEQ ID NO: 77170 - RNA, 21 nt, Artificial Sequence
  Chemically synthesized
acucucccuggaaacacggau

SEQ ID NO: 77171 - RNA, 21 nt, Artificial Sequence
  Chemically synthesized
uucacuacccagugugugugu

SEQ ID NO: 77172 - RNA, 21 nt, Artificial Sequence
  Chemically synthesized
uaauuagguucuggcgauuuc

SEQ ID NO: 77173 - RNA, 21 nt, Artificial Sequence
  Chemically synthesized
cuuggaaauggauuuuaggcc

SEQ ID NO: 77174 - RNA, 21 nt, Artificial Sequence
  Chemically synthesized
ucggauuguucgaggccaaac

SEQ ID NO: 77175 - RNA, 21 nt, Artificial Sequence
  Chemically synthesized
aauugcuaaggacaauagcag

SEQ ID NO: 77176 - RNA, 21 nt, Artificial Sequence
  Chemically synthesized
gagcuuuugagugguuugcug

SEQ ID NO: 77177 - RNA, 21 nt, Artificial Sequence
  Chemically synthesized
aucuauaugguacaaaugcag

SEQ ID NO: 77178 - RNA, 21 nt, Artificial Sequence
  Chemically synthesized
aggaagacuuuuucagcgugc

SEQ ID NO: 77179 - RNA, 21 nt, Artificial Sequence
  Chemically synthesized
aaaaagcguggcuuuaaaaug

SEQ ID NO: 77180 - RNA, 21 nt, Artificial Sequence
  Chemically synthesized
aagaaguugucauuaccaagg

SEQ ID NO: 77181 - RNA, 21 nt, Artificial Sequence
  Chemically synthesized
uaugcagaauggcagacagug

SEQ ID NO: 77182 - RNA, 21 nt, Artificial Sequence
  Chemically synthesized
ucucucucugcacaacaucac

SEQ ID NO: 77183 - RNA, 21 nt, Artificial Sequence
  Chemically synthesized
ucuucuuucucagccuggcca

SEQ ID NO: 77184 - RNA, 21 nt, Artificial Sequence
  Chemically synthesized
cuaugggauagcuguuaaugc

SEQ ID NO: 77185 - RNA, 21 nt, Artificial Sequence
  Chemically synthesized
aaagaugugccacuuguauuc

SEQ ID NO: 77186 - RNA, 21 nt, Artificial Sequence
  Chemically synthesized
uuggcguguucuucuguggac

SEQ ID NO: 77187 - RNA, 21 nt, Artificial Sequence
  Chemically synthesized
aacucacuuucugaguuauca

SEQ ID NO: 77188 - RNA, 21 nt, Artificial Sequence
  Chemically synthesized
augcaagagcuuuugaguggu

SEQ ID NO: 77189 - RNA, 21 nt, Artificial Sequence
  Chemically synthesized
acugcccugacagauguauuu

SEQ ID NO: 77190 - RNA, 21 nt, Artificial Sequence
  Chemically synthesized
aagcguggcuuuaaaauggcg

SEQ ID NO: 77191 - RNA, 21 nt, Artificial Sequence
  Chemically synthesized
cuguggucuuguaugcaugug

SEQ ID NO: 77192 - RNA, 21 nt, Artificial Sequence
  Chemically synthesized
cucucucugcacaacaucacc

SEQ ID NO: 77193 - RNA, 21 nt, Artificial Sequence
  Chemically synthesized
augaguuguucugguacacac

SEQ ID NO: 77194 - RNA, 21 nt, Artificial Sequence
  Chemically synthesized
aacuggucgccuaugggauag

SEQ ID NO: 77195 - RNA, 21 nt, Artificial Sequence
  Chemically synthesized
uuuuggguucaacacuggcuu

SEQ ID NO: 77196 - RNA, 21 nt, Artificial Sequence
  Chemically synthesized
auuuuggguucaacacuggcu

SEQ ID NO: 77197 - RNA, 21 nt, Artificial Sequence
  Chemically synthesized
uugacacguucuacugguaug

SEQ ID NO: 77198 - RNA, 21 nt, Artificial Sequence
  Chemically synthesized
acuccaccaggaauuccugug

SEQ ID NO: 77199 - RNA, 21 nt, Artificial Sequence
  Chemically synthesized
uuggaggucaaguccaggcau

SEQ ID NO: 77200 - RNA, 21 nt, Artificial Sequence
  Chemically synthesized
guauuucuacuggauuugccg

SEQ ID NO: 77201 - RNA, 21 nt, Artificial Sequence
  Chemically synthesized
aauggauuuuaggcccugugg

SEQ ID NO: 77202 - RNA, 21 nt, Artificial Sequence
  Chemically synthesized
agcagauugccuacaaucacc

SEQ ID NO: 77203 - RNA, 21 nt, Artificial Sequence
  Chemically synthesized
aagcagauugccuacaaucac

SEQ ID NO: 77204 - RNA, 21 nt, Artificial Sequence
  Chemically synthesized
aaagcagaagaccuucuaugg

SEQ ID NO: 77205 - RNA, 21 nt, Artificial Sequence
  Chemically synthesized
uuugaaugagggucucuccac

SEQ ID NO: 77206 - RNA, 21 nt, Artificial Sequence
  Chemically synthesized
uacaaaugcagugaggcacag

SEQ ID NO: 77207 - RNA, 21 nt, Artificial Sequence
  Chemically synthesized
gauguauuucacuacccagug

SEQ ID NO: 77208 - RNA, 21 nt, Artificial Sequence
  Chemically synthesized
uuggaacugcccugacagaug

SEQ ID NO: 77209 - RNA, 21 nt, Artificial Sequence
  Chemically synthesized
uuuacuagggaagcccuuacu

SEQ ID NO: 77210 - RNA, 21 nt, Artificial Sequence
  Chemically synthesized
uucgaggccaaacccaagaca

SEQ ID NO: 77211 - RNA, 21 nt, Artificial Sequence
  Chemically synthesized
uguuuucaucgucuucuuucu

SEQ ID NO: 77212 - RNA, 21 nt, Artificial Sequence
  Chemically synthesized
uuguucugguacacacaccau

SEQ ID NO: 77213 - RNA, 21 nt, Artificial Sequence
  Chemically synthesized
aguuguucugguacacacacc

SEQ ID NO: 77214 - RNA, 21 nt, Artificial Sequence
  Chemically synthesized
cuaacgagagcuaccucaacc

SEQ ID NO: 77215 - RNA, 21 nt, Artificial Sequence
  Chemically synthesized
ucuucaaccuggaacgcuacc

SEQ ID NO: 77216 - RNA, 21 nt, Artificial Sequence
  Chemically synthesized
aauucuaauaccugucagucg

SEQ ID NO: 77217 - RNA, 21 nt, Artificial Sequence
  Chemically synthesized
acuuuggaggucaaguccagg

SEQ ID NO: 77218 - RNA, 21 nt, Artificial Sequence
  Chemically synthesized
uauuaguacucucauggcugg

SEQ ID NO: 77219 - RNA, 21 nt, Artificial Sequence
  Chemically synthesized
acuucacaugaaaaagcgugg

SEQ ID NO: 77220 - RNA, 21 nt, Artificial Sequence
  Chemically synthesized
auugcuaaggacaauagcagg

SEQ ID NO: 77221 - RNA, 21 nt, Artificial Sequence
  Chemically synthesized
agaggaacaaguauuugcugc

SEQ ID NO: 77222 - RNA, 21 nt, Artificial Sequence
  Chemically synthesized
uaacuauugugaacaguacac

SEQ ID NO: 77223 - RNA, 21 nt, Artificial Sequence
  Chemically synthesized
auugauuccaaagaacuccac

SEQ ID NO: 77224 - RNA, 21 nt, Artificial Sequence
  Chemically synthesized
uacaacaaggagagcuucuag

SEQ ID NO: 77225 - RNA, 21 nt, Artificial Sequence
  Chemically synthesized
uucuauuacaacaaggagagc

SEQ ID NO: 77226 - RNA, 21 nt, Artificial Sequence
  Chemically synthesized
uguggaccuaaagcucucucg

SEQ ID NO: 77227 - RNA, 21 nt, Artificial Sequence
  Chemically synthesized
acugggacgaaaauacugacg

SEQ ID NO: 77228 - RNA, 21 nt, Artificial Sequence
  Chemically synthesized
uauaugguacaaaugcaguga

SEQ ID NO: 77229 - RNA, 21 nt, Artificial Sequence
  Chemically synthesized
aaagcguggcuuuaaaauggc

SEQ ID NO: 77230 - RNA, 21 nt, Artificial Sequence
  Chemically synthesized
ucugcacaacaucaccuucug

SEQ ID NO: 77231 - RNA, 21 nt, Artificial Sequence
  Chemically synthesized
uagacaaaaaccucagauuuc

SEQ ID NO: 77232 - RNA, 21 nt, Artificial Sequence
  Chemically synthesized
cuccaccaggaauuccuguga

SEQ ID NO: 77233 - RNA, 21 nt, Artificial Sequence
  Chemically synthesized
uucaaaagaugugccacuugu

SEQ ID NO: 77234 - RNA, 21 nt, Artificial Sequence
  Chemically synthesized
uauuggcguguucuucugugg

SEQ ID NO: 77235 - RNA, 21 nt, Artificial Sequence
  Chemically synthesized
uucacauagcuuuacacuggg

SEQ ID NO: 77236 - RNA, 21 nt, Artificial Sequence
  Chemically synthesized
aggcucuucacauagcuuuac

SEQ ID NO: 77237 - RNA, 21 nt, Artificial Sequence
  Chemically synthesized
cugaucucuuacucucccugg

SEQ ID NO: 77238 - RNA, 21 nt, Artificial Sequence
  Chemically synthesized
uugagugguuugcugaucucu

SEQ ID NO: 77239 - RNA, 21 nt, Artificial Sequence
  Chemically synthesized
auaucuucgcuggaguggcac

SEQ ID NO: 77240 - RNA, 21 nt, Artificial Sequence
  Chemically synthesized
aguacaucuuggugcagugcc

SEQ ID NO: 77241 - RNA, 21 nt, Artificial Sequence
  Chemically synthesized
aauuuccugacagccgaagag

SEQ ID NO: 77242 - RNA, 21 nt, Artificial Sequence
  Chemically synthesized
uacugguaugaagaggaggag

SEQ ID NO: 77243 - RNA, 21 nt, Artificial Sequence
  Chemically synthesized
gauuccaaagaacuccaccag

SEQ ID NO: 77244 - RNA, 21 nt, Artificial Sequence
  Chemically synthesized
gugccacuuguauucaucagc

SEQ ID NO: 77245 - RNA, 21 nt, Artificial Sequence
  Chemically synthesized
gaugugccacuuguauucauc

SEQ ID NO: 77246 - RNA, 21 nt, Artificial Sequence
  Chemically synthesized
agcaguauuggcguguucuuc

SEQ ID NO: 77247 - RNA, 21 nt, Artificial Sequence
  Chemically synthesized
uauuucuuaccggcugggaug

SEQ ID NO: 77248 - RNA, 21 nt, Artificial Sequence
  Chemically synthesized
guguauuucuacuggauuugc

SEQ ID NO: 77249 - RNA, 21 nt, Artificial Sequence
  Chemically synthesized
auguauuucacuacccagugu

SEQ ID NO: 77250 - RNA, 21 nt, Artificial Sequence
  Chemically synthesized
aauuuucuggcaaggaacccu

SEQ ID NO: 77251 - RNA, 21 nt, Artificial Sequence
  Chemically synthesized
agagaccgcuaugcagaaugg

SEQ ID NO: 77252 - RNA, 21 nt, Artificial Sequence
  Chemically synthesized
aucaugaccucgucaacugag

SEQ ID NO: 77253 - RNA, 21 nt, Artificial Sequence
  Chemically synthesized
ugaauugcuaaggacaauagc

SEQ ID NO: 77254 - RNA, 21 nt, Artificial Sequence
  Chemically synthesized
aaacacaaccacugaauugcu

SEQ ID NO: 77255 - RNA, 21 nt, Artificial Sequence
  Chemically synthesized
uaaugcaaccauccacaucgu

SEQ ID NO: 77256 - RNA, 21 nt, Artificial Sequence
  Chemically synthesized
guuaaugcaaccauccacauc

SEQ ID NO: 77257 - RNA, 21 nt, Artificial Sequence
  Chemically synthesized
augcuaauucuaauaccuguc

SEQ ID NO: 77258 - RNA, 21 nt, Artificial Sequence
  Chemically synthesized
auaauuuacuagggaagcccu

SEQ ID NO: 77259 - RNA, 21 nt, Artificial Sequence
  Chemically synthesized
uaugaagaggaggagucuuuc

SEQ ID NO: 77260 - RNA, 21 nt, Artificial Sequence
  Chemically synthesized
guuauugauuccaaagaacuc

SEQ ID NO: 77261 - RNA, 21 nt, Artificial Sequence
  Chemically synthesized
uugccgggaugcaagagcuuu

SEQ ID NO: 77262 - RNA, 21 nt, Artificial Sequence
  Chemically synthesized
uacaucuuggugcagugccca

SEQ ID NO: 77263 - RNA, 21 nt, Artificial Sequence
  Chemically synthesized
aaguugucauuaccaaggugg

SEQ ID NO: 77264 - RNA, 21 nt, Artificial Sequence
  Chemically synthesized
auuuacuagggaagcccuuac

SEQ ID NO: 77265 - RNA, 21 nt, Artificial Sequence
  Chemically synthesized
gacagucucucucugcacaac

SEQ ID NO: 77266 - RNA, 21 nt, Artificial Sequence
  Chemically synthesized
ccaaacccaagacagucucuc

SEQ ID NO: 77267 - RNA, 21 nt, Artificial Sequence
  Chemically synthesized
ucucuggcuuuagucuugauc

SEQ ID NO: 77268 - RNA, 21 nt, Artificial Sequence
  Chemically synthesized
aagaggaacaaguauuugcug

SEQ ID NO: 77269 - RNA, 21 nt, Artificial Sequence
  Chemically synthesized
aaguccaggcauuguguuuuc

SEQ ID NO: 77270 - RNA, 21 nt, Artificial Sequence
  Chemically synthesized
aagcagaagaccuucuauggg

SEQ ID NO: 77271 - RNA, 21 nt, Artificial Sequence
  Chemically synthesized
uacaggcuuaaagcagaagac

SEQ ID NO: 77272 - RNA, 21 nt, Artificial Sequence
  Chemically synthesized
auacugacgugauuacaggcu

SEQ ID NO: 77273 - RNA, 21 nt, Artificial Sequence
  Chemically synthesized
ucuucacauagcuuuacacug

SEQ ID NO: 77274 - RNA, 21 nt, Artificial Sequence
  Chemically synthesized
cuuacucucccuggaaacacg

SEQ ID NO: 77275 - RNA, 21 nt, Artificial Sequence
  Chemically synthesized
aaaugcagugaggcacagacc

SEQ ID NO: 77276 - RNA, 21 nt, Artificial Sequence
  Chemically synthesized
uucgcugcucuucugaaaucu

SEQ ID NO: 77277 - RNA, 21 nt, Artificial Sequence
  Chemically synthesized
cccaggaagacuuuuucagcg

SEQ ID NO: 77278 - RNA, 21 nt, Artificial Sequence
  Chemically synthesized
guggcuuuaaaauggcgccag

SEQ ID NO: 77279 - RNA, 21 nt, Artificial Sequence
  Chemically synthesized
uucacaugaaaaagcguggcu

SEQ ID NO: 77280 - RNA, 21 nt, Artificial Sequence
  Chemically synthesized
uuucaucgucuucuuucucag

SEQ ID NO: 77281 - RNA, 21 nt, Artificial Sequence
  Chemically synthesized
ugucuaauugccuccuccacg

SEQ ID NO: 77282 - RNA, 21 nt, Artificial Sequence
  Chemically synthesized
uugaagaaaugcgccacgaug

SEQ ID NO: 77283 - RNA, 21 nt, Artificial Sequence
  Chemically synthesized
uucagaagagcagcgaaggga

SEQ ID NO: 77284 - RNA, 21 nt, Artificial Sequence
  Chemically synthesized
uauuauucaccaguucccaac

SEQ ID NO: 77285 - RNA, 21 nt, Artificial Sequence
  Chemically synthesized
ugugaagagccugauuuucau

SEQ ID NO: 77286 - RNA, 21 nt, Artificial Sequence
  Chemically synthesized
uucugcauagcggucucuaca

SEQ ID NO: 77287 - RNA, 21 nt, Artificial Sequence
  Chemically synthesized
cuaugugaagagccugauuuu

SEQ ID NO: 77288 - RNA, 21 nt, Artificial Sequence
  Chemically synthesized
uggguuuggccucgaacaauc

SEQ ID NO: 77289 - RNA, 21 nt, Artificial Sequence
  Chemically synthesized
ccuaauuauucuuucacaugc

SEQ ID NO: 77290 - RNA, 21 nt, Artificial Sequence
  Chemically synthesized
ucacucauccguguuuccagg

SEQ ID NO: 77291 - RNA, 21 nt, Artificial Sequence
  Chemically synthesized
uugucuaauugccuccuccac

SEQ ID NO: 77292 - RNA, 21 nt, Artificial Sequence
  Chemically synthesized
ucuagaagcucuccuuguugu

SEQ ID NO: 77293 - RNA, 21 nt, Artificial Sequence
  Chemically synthesized
ucuugcaucccggcaaaucca

SEQ ID NO: 77294 - RNA, 21 nt, Artificial Sequence
  Chemically synthesized
uuauuauucaccaguucccaa

SEQ ID NO: 77295 - RNA, 21 nt, Artificial Sequence
  Chemically synthesized
uugaaaucgccagaaccuaau

SEQ ID NO: 77296 - RNA, 21 nt, Artificial Sequence
  Chemically synthesized
uaacucguguguaauggaaag

SEQ ID NO: 77297 - RNA, 21 nt, Artificial Sequence
  Chemically synthesized
gcuaugugaagagccugauuu

SEQ ID NO: 77298 - RNA, 21 nt, Artificial Sequence
  Chemically synthesized
ugcuuuaagccuguaaucacg

SEQ ID NO: 77299 - RNA, 21 nt, Artificial Sequence
  Chemically synthesized
uuuccaagccgaggguuccuu

SEQ ID NO: 77300 - RNA, 21 nt, Artificial Sequence
  Chemically synthesized
uugacgaggucaugaucaaga

SEQ ID NO: 77301 - RNA, 21 nt, Artificial Sequence
  Chemically synthesized
agaaauacaccuugcucagcu

SEQ ID NO: 77302 - RNA, 21 nt, Artificial Sequence
  Chemically synthesized
uucaugugaaguuccaggacu

SEQ ID NO: 77303 - RNA, 21 nt, Artificial Sequence
  Chemically synthesized
uuggaaagugcggccagaagu

SEQ ID NO: 77304 - RNA, 21 nt, Artificial Sequence
  Chemically synthesized
ucccauagaaggucuucugcu

SEQ ID NO: 77305 - RNA, 21 nt, Artificial Sequence
  Chemically synthesized
ucugcuuuaagccuguaauca

SEQ ID NO: 77306 - RNA, 21 nt, Artificial Sequence
  Chemically synthesized
ucacaugcauacaagaccaca

SEQ ID NO: 77307 - RNA, 21 nt, Artificial Sequence
  Chemically synthesized
uuaguaagggcuucccuagua

SEQ ID NO: 77308 - RNA, 21 nt, Artificial Sequence
  Chemically synthesized
uguaccagaacaacucauagg

SEQ ID NO: 77309 - RNA, 21 nt, Artificial Sequence
  Chemically synthesized
ucaugaucaagacuaaagcca

SEQ ID NO: 77310 - RNA, 21 nt, Artificial Sequence
  Chemically synthesized
uccucuucauaccaguagaac

SEQ ID NO: 77311 - RNA, 21 nt, Artificial Sequence
  Chemically synthesized
aauacaaguggcacaucuuuu

SEQ ID NO: 77312 - RNA, 21 nt, Artificial Sequence
  Chemically synthesized
ucuuucacaugcauacaagac

SEQ ID NO: 77313 - RNA, 21 nt, Artificial Sequence
  Chemically synthesized
ugauguugugcagagagagac

SEQ ID NO: 77314 - RNA, 21 nt, Artificial Sequence
  Chemically synthesized
ugaagaaaugcgccacgaugu

SEQ ID NO: 77315 - RNA, 21 nt, Artificial Sequence
  Chemically synthesized
ugugaaaucugagguuuuugu

SEQ ID NO: 77316 - RNA, 21 nt, Artificial Sequence
  Chemically synthesized
ugauugaaaacacaaugccug

SEQ ID NO: 77317 - RNA, 21 nt, Artificial Sequence
  Chemically synthesized
ccucauucaaaauccagcacc

SEQ ID NO: 77318 - RNA, 21 nt, Artificial Sequence
  Chemically synthesized
ucugucagggcaguuccaaag

SEQ ID NO: 77319 - RNA, 21 nt, Artificial Sequence
  Chemically synthesized
uuggguuuggccucgaacaau

SEQ ID NO: 77320 - RNA, 21 nt, Artificial Sequence
  Chemically synthesized
ucaguugacgaggucaugauc

SEQ ID NO: 77321 - RNA, 21 nt, Artificial Sequence
  Chemically synthesized
uaucccauaggcgaccaguuu

SEQ ID NO: 77322 - RNA, 21 nt, Artificial Sequence
  Chemically synthesized
acagguauuagaauuagcaug

SEQ ID NO: 77323 - RNA, 21 nt, Artificial Sequence
  Chemically synthesized
ucaguauuuucgucccagugu

SEQ ID NO: 77324 - RNA, 21 nt, Artificial Sequence
  Chemically synthesized
auuccugguggaguucuuugg

SEQ ID NO: 77325 - RNA, 21 nt, Artificial Sequence
  Chemically synthesized
ugauuguaggcaaucugcuug

SEQ ID NO: 77326 - RNA, 21 nt, Artificial Sequence
  Chemically synthesized
uauuuucgucccaguguaaag

SEQ ID NO: 77327 - RNA, 21 nt, Artificial Sequence
  Chemically synthesized
uguugcccagcuuggaaagug

SEQ ID NO: 77328 - RNA, 21 nt, Artificial Sequence
  Chemically synthesized
uaccaguagaacgugucaaua

SEQ ID NO: 77329 - RNA, 21 nt, Artificial Sequence
  Chemically synthesized
aauuccugguggaguucuuug

SEQ ID NO: 77330 - RNA, 21 nt, Artificial Sequence
  Chemically synthesized
uuccugguggaguucuuugga

SEQ ID NO: 77331 - RNA, 21 nt, Artificial Sequence
  Chemically synthesized
uugcaucccggcaaauccagu

SEQ ID NO: 77332 - RNA, 21 nt, Artificial Sequence
  Chemically synthesized
ucugcauagcggucucuacag

SEQ ID NO: 77333 - RNA, 21 nt, Artificial Sequence
  Chemically synthesized
ugaaaacaugguguguguacc

SEQ ID NO: 77334 - RNA, 21 nt, Artificial Sequence
  Chemically synthesized
ucauaggaggccugucugaug

SEQ ID NO: 77335 - RNA, 21 nt, Artificial Sequence
  Chemically synthesized
aguuaaaauucaggcacagug

SEQ ID NO: 77336 - RNA, 21 nt, Artificial Sequence
  Chemically synthesized
guaugguauaguguacuguuc

SEQ ID NO: 77337 - RNA, 21 nt, Artificial Sequence
  Chemically synthesized
aauuuauucccagccaugaga

SEQ ID NO: 77338 - RNA, 21 nt, Artificial Sequence
  Chemically synthesized
uggacuugaccuccaaagucu

SEQ ID NO: 77339 - RNA, 21 nt, Artificial Sequence
  Chemically synthesized
ugugaaguuccaggacuccag

SEQ ID NO: 77340 - RNA, 21 nt, Artificial Sequence
  Chemically synthesized
aauaacucguguguaauggaa

SEQ ID NO: 77341 - RNA, 21 nt, Artificial Sequence
  Chemically synthesized
uccuccucuucauaccaguag

SEQ ID NO: 77342 - RNA, 21 nt, Artificial Sequence
  Chemically synthesized
cuccuuguuguaauagaaaug

SEQ ID NO: 77343 - RNA, 21 nt, Artificial Sequence
  Chemically synthesized
uaugguggagagacccucauu

SEQ ID NO: 77344 - RNA, 21 nt, Artificial Sequence
  Chemically synthesized
ucgccagaaccuaauuauucu

SEQ ID NO: 77345 - RNA, 21 nt, Artificial Sequence
  Chemically synthesized
uggaugguugcauuaacagcu

SEQ ID NO: 77346 - RNA, 21 nt, Artificial Sequence
  Chemically synthesized
ugaugaauacaaguggcacau

SEQ ID NO: 77347 - RNA, 21 nt, Artificial Sequence
  Chemically synthesized
ucuuguugaaaucgccagaac

SEQ ID NO: 77348 - RNA, 21 nt, Artificial Sequence
  Chemically synthesized
uccauuuccaagccgaggguu

SEQ ID NO: 77349 - RNA, 21 nt, Artificial Sequence
  Chemically synthesized
ugccauucugcauagcggucu

SEQ ID NO: 77350 - RNA, 21 nt, Artificial Sequence
  Chemically synthesized
ucuacagaaggugauguugug

SEQ ID NO: 77351 - RNA, 21 nt, Artificial Sequence
  Chemically synthesized
ucggcugucaggaaauuucuu

SEQ ID NO: 77352 - RNA, 21 nt, Artificial Sequence
  Chemically synthesized
cuucauaccaguagaacgugu

SEQ ID NO: 77353 - RNA, 21 nt, Artificial Sequence
  Chemically synthesized
aaggaaguaugguauagugua

SEQ ID NO: 77354 - RNA, 21 nt, Artificial Sequence
  Chemically synthesized
uagcaauucagugguuguguu

SEQ ID NO: 77355 - RNA, 21 nt, Artificial Sequence
  Chemically synthesized
aguaugguauaguguacuguu

SEQ ID NO: 77356 - RNA, 21 nt, Artificial Sequence
  Chemically synthesized
uggaguucuuuggaaucaaua

SEQ ID NO: 77357 - RNA, 21 nt, Artificial Sequence
  Chemically synthesized
ugaaaacacaaugccuggacu

SEQ ID NO: 77358 - RNA, 21 nt, Artificial Sequence
  Chemically synthesized
uguaggcaaucugcuugaacu

SEQ ID NO: 77359 - RNA, 21 nt, Artificial Sequence
  Chemically synthesized
ccagccgguaagaaauauaug

SEQ ID NO: 77360 - RNA, 21 nt, Artificial Sequence
  Chemically synthesized
acuggguagugaaauacaucu

SEQ ID NO: 77361 - RNA, 21 nt, Artificial Sequence
  Chemically synthesized
ugcuauuguccuuagcaauuc

SEQ ID NO: 77362 - RNA, 21 nt, Artificial Sequence
  Chemically synthesized
ucuucucccucaccugugucu

SEQ ID NO: 77363 - RNA, 21 nt, Artificial Sequence
  Chemically synthesized
aucccauaggcgaccaguuug

SEQ ID NO: 77364 - RNA, 21 nt, Artificial Sequence
  Chemically synthesized
auuuucaucccagccgguaag

SEQ ID NO: 77365 - RNA, 21 nt, Artificial Sequence
  Chemically synthesized
uccagggagaguaagagauca

SEQ ID NO: 77366 - RNA, 21 nt, Artificial Sequence
  Chemically synthesized
gauuucagaagagcagcgaag

SEQ ID NO: 77367 - RNA, 21 nt, Artificial Sequence
  Chemically synthesized
ugaaguuccaggacuccagag

SEQ ID NO: 77368 - RNA, 21 nt, Artificial Sequence
  Chemically synthesized
ucuuggguuuggccucgaaca

SEQ ID NO: 77369 - RNA, 21 nt, Artificial Sequence
  Chemically synthesized
accaguuugugaaaucugagg

SEQ ID NO: 77370 - RNA, 21 nt, Artificial Sequence
  Chemically synthesized
acaccuugcucagcuucagug

SEQ ID NO: 77371 - RNA, 21 nt, Artificial Sequence
  Chemically synthesized
uguugaaaucgccagaaccua

SEQ ID NO: 77372 - RNA, 21 nt, Artificial Sequence
  Chemically synthesized
aguagaacgugucaauaaaca

SEQ ID NO: 77373 - RNA, 21 nt, Artificial Sequence
  Chemically synthesized
ucauaucaacaggccgucaca

SEQ ID NO: 77374 - RNA, 21 nt, Artificial Sequence
  Chemically synthesized
aacacaaugccuggacuugac

SEQ ID NO: 77375 - RNA, 21 nt, Artificial Sequence
  Chemically synthesized
ugaaaucgccagaaccuaauu

SEQ ID NO: 77376 - RNA, 21 nt, Artificial Sequence
  Chemically synthesized
uugcucuucggcugucaggaa

SEQ ID NO: 77377 - RNA, 21 nt, Artificial Sequence
  Chemically synthesized
ucuucggcugucaggaaauuu

SEQ ID NO: 77378 - RNA, 21 nt, Artificial Sequence
  Chemically synthesized
guguugaacccaaaauaacuc

SEQ ID NO: 77379 - RNA, 21 nt, Artificial Sequence
  Chemically synthesized
auaacucguguguaauggaaa

SEQ ID NO: 77380 - RNA, 21 nt, Artificial Sequence
  Chemically synthesized
cucguguguaauggaaagacu

SEQ ID NO: 77381 - RNA, 21 nt, Artificial Sequence
  Chemically synthesized
acagaagaacacgccaauacu

SEQ ID NO: 77382 - RNA, 21 nt, Artificial Sequence
  Chemically synthesized
agaaggucuucugcuuuaagc

SEQ ID NO: 77383 - RNA, 21 nt, Artificial Sequence
  Chemically synthesized
gucaguauuuucgucccagug

SEQ ID NO: 77384 - RNA, 21 nt, Artificial Sequence
  Chemically synthesized
aagcuaugugaagagccugau

SEQ ID NO: 77385 - RNA, 21 nt, Artificial Sequence
  Chemically synthesized
ucaugugaaguuccaggacuc

SEQ ID NO: 77386 - RNA, 21 nt, Artificial Sequence
  Chemically synthesized
acuuguugcucuucggcuguc

SEQ ID NO: 77387 - RNA, 21 nt, Artificial Sequence
  Chemically synthesized
aggcugagaaagaagacgaug

SEQ ID NO: 77388 - RNA, 21 nt, Artificial Sequence
  Chemically synthesized
uccucugcagcaaauacuugu

SEQ ID NO: 77389 - RNA, 21 nt, Artificial Sequence
  Chemically synthesized
ucuggauguugggucguuagu

SEQ ID NO: 77390 - RNA, 21 nt, Artificial Sequence
  Chemically synthesized
uggaaagacuccuccucuuca

SEQ ID NO: 77391 - RNA, 21 nt, Artificial Sequence
  Chemically synthesized
uguucuguuguauaugacaug

SEQ ID NO: 77392 - RNA, 21 nt, Artificial Sequence
  Chemically synthesized
ucuuuugaaguguccucgaga

SEQ ID NO: 77393 - RNA, 21 nt, Artificial Sequence
  Chemically synthesized
aggucuucugcuuuaagccug

SEQ ID NO: 77394 - RNA, 21 nt, Artificial Sequence
  Chemically synthesized
ugaaauacaucugucagggca

SEQ ID NO: 77395 - RNA, 21 nt, Artificial Sequence
  Chemically synthesized
auacaucugucagggcaguuc

SEQ ID NO: 77396 - RNA, 21 nt, Artificial Sequence
  Chemically synthesized
uacugcccuggcgccauuuua

SEQ ID NO: 77397 - RNA, 21 nt, Artificial Sequence
  Chemically synthesized
aagaccacagggccuaaaauc

SEQ ID NO: 77398 - RNA, 21 nt, Artificial Sequence
  Chemically synthesized
ucguuaguaagggcuucccua

SEQ ID NO: 77399 - RNA, 21 nt, Artificial Sequence
  Chemically synthesized
acgucaguauuuucgucccag

SEQ ID NO: 77400 - RNA, 21 nt, Artificial Sequence
  Chemically synthesized
uuucgucccaguguaaagcua

SEQ ID NO: 77401 - RNA, 21 nt, Artificial Sequence
  Chemically synthesized
uuuccagggagaguaagagau

SEQ ID NO: 77402 - RNA, 21 nt, Artificial Sequence
  Chemically synthesized
ugcccuggcgccauuuuaaag

SEQ ID NO: 77403 - RNA, 21 nt, Artificial Sequence
  Chemically synthesized
augugaaguuccaggacucca

SEQ ID NO: 77404 - RNA, 21 nt, Artificial Sequence
  Chemically synthesized
cuucggcugucaggaaauuuc

SEQ ID NO: 77405 - RNA, 21 nt, Artificial Sequence
  Chemically synthesized
guguguguaccagaacaacuc

SEQ ID NO: 77406 - RNA, 21 nt, Artificial Sequence
  Chemically synthesized
uggauguugggucguuaguaa

SEQ ID NO: 77407 - RNA, 21 nt, Artificial Sequence
  Chemically synthesized
guguguaauggaaagacuccu

SEQ ID NO: 77408 - RNA, 21 nt, Artificial Sequence
  Chemically synthesized
ucaacaggccgucacaggaau

SEQ ID NO: 77409 - RNA, 21 nt, Artificial Sequence
  Chemically synthesized
agccgguaagaaauauaugau

SEQ ID NO: 77410 - RNA, 21 nt, Artificial Sequence
  Chemically synthesized
acuucuuguugaaaucgccag

SEQ ID NO: 77411 - RNA, 21 nt, Artificial Sequence
  Chemically synthesized
cucuacagaaggugauguugu

SEQ ID NO: 77412 - RNA, 21 nt, Artificial Sequence
  Chemically synthesized
uaagggcuucccuaguaaauu

SEQ ID NO: 77413 - RNA, 21 nt, Artificial Sequence
  Chemically synthesized
uuucgacugacagguauuaga

SEQ ID NO: 77414 - RNA, 21 nt, Artificial Sequence
  Chemically synthesized
cauaucaacaggccgucacag

SEQ ID NO: 77415 - RNA, 21 nt, Artificial Sequence
  Chemically synthesized
auacaccuugcucagcuucag

SEQ ID NO: 77416 - RNA, 21 nt, Artificial Sequence
  Chemically synthesized
uaggaggccugucugaugaac

SEQ ID NO: 77417 - RNA, 21 nt, Artificial Sequence
  Chemically synthesized
aagacuaaagccagagagauc

SEQ ID NO: 77418 - RNA, 21 nt, Artificial Sequence
  Chemically synthesized
ucccauaggcgaccaguuugu

SEQ ID NO: 77419 - RNA, 21 nt, Artificial Sequence
  Chemically synthesized
agguuuuugucuaauugccuc

SEQ ID NO: 77420 - RNA, 21 nt, Artificial Sequence
  Chemically synthesized
uugggucguuaguaagggcuu

SEQ ID NO: 77421 - RNA, 21 nt, Artificial Sequence
  Chemically synthesized
agaacgugucaauaaacagau

SEQ ID NO: 77422 - RNA, 21 nt, Artificial Sequence
  Chemically synthesized
cuccaaagucuagaagcucuc

SEQ ID NO: 77423 - RNA, 21 nt, Artificial Sequence
  Chemically synthesized
guaagagaucagcaaaccacu

SEQ ID NO: 77424 - RNA, 21 nt, Artificial Sequence
  Chemically synthesized
ccaucaugauacuuguugcuc

SEQ ID NO: 77425 - RNA, 21 nt, Artificial Sequence
  Chemically synthesized
cuuucacaugcauacaagacc

SEQ ID NO: 77426 - RNA, 21 nt, Artificial Sequence
  Chemically synthesized
ugugcagagagagacugucuu

SEQ ID NO: 77427 - RNA, 21 nt, Artificial Sequence
  Chemically synthesized
ugguguguguaccagaacaac

SEQ ID NO: 77428 - RNA, 21 nt, Artificial Sequence
  Chemically synthesized
cucauaucaacaggccgucac

SEQ ID NO: 77429 - RNA, 21 nt, Artificial Sequence
  Chemically synthesized
cagaagaacacgccaauacug

SEQ ID NO: 77430 - RNA, 21 nt, Artificial Sequence
  Chemically synthesized
aguaagagaucagcaaaccac

SEQ ID NO: 77431 - RNA, 21 nt, Artificial Sequence
  Chemically synthesized
cacugcauuuguaccauauag

SEQ ID NO: 77432 - RNA, 21 nt, Artificial Sequence
  Chemically synthesized
guugaaaucgccagaaccuaa

SEQ ID NO: 77433 - RNA, 21 nt, Artificial Sequence
  Chemically synthesized
ugcauagcggucucuacagaa

SEQ ID NO: 77434 - RNA, 21 nt, Artificial Sequence
  Chemically synthesized
agaaggugauguugugcagag

SEQ ID NO: 77435 - RNA, 21 nt, Artificial Sequence
  Chemically synthesized
aauucaggcacagugcggaug

SEQ ID NO: 77436 - RNA, 21 nt, Artificial Sequence
  Chemically synthesized
agaagcucuccuuguuguaau

SEQ ID NO: 77437 - RNA, 21 nt, Artificial Sequence
  Chemically synthesized
uccacagaagaacacgccaau

SEQ ID NO: 77438 - RNA, 21 nt, Artificial Sequence
  Chemically synthesized
ucuucugcuuuaagccuguaa

SEQ ID NO: 77439 - RNA, 21 nt, Artificial Sequence
  Chemically synthesized
cuuuaagccuguaaucacguc

SEQ ID NO: 77440 - RNA, 21 nt, Artificial Sequence
  Chemically synthesized
auaugguggagagacccucau

SEQ ID NO: 77441 - RNA, 21 nt, Artificial Sequence
  Chemically synthesized
ucaucccagccgguaagaaau

SEQ ID NO: 77442 - RNA, 21 nt, Artificial Sequence
  Chemically synthesized
acugcauuuguaccauauaga

SEQ ID NO: 77443 - RNA, 21 nt, Artificial Sequence
  Chemically synthesized
accagaacaacucauaggagg

SEQ ID NO: 77444 - RNA, 21 nt, Artificial Sequence
  Chemically synthesized
augaucaagacuaaagccaga

SEQ ID NO: 77445 - RNA, 21 nt, Artificial Sequence
  Chemically synthesized
agacuaaagccagagagauca

SEQ ID NO: 77446 - RNA, 21 nt, Artificial Sequence
  Chemically synthesized
gaaauuucuucucccucaccu

SEQ ID NO: 77447 - RNA, 21 nt, Artificial Sequence
  Chemically synthesized
aagccagagagaucaccagac

SEQ ID NO: 77448 - RNA, 21 nt, Artificial Sequence
  Chemically synthesized
aauggaaagacuccuccucuu

SEQ ID NO: 77449 - RNA, 21 nt, Artificial Sequence
  Chemically synthesized
auaccaguagaacgugucaau

SEQ ID NO: 77450 - RNA, 21 nt, Artificial Sequence
  Chemically synthesized
aggaaguaugguauaguguac

SEQ ID NO: 77451 - RNA, 21 nt, Artificial Sequence
  Chemically synthesized
ccaaagucuagaagcucuccu

SEQ ID NO: 77452 - RNA, 21 nt, Artificial Sequence
  Chemically synthesized
uagaagcucuccuuguuguaa

SEQ ID NO: 77453 - RNA, 21 nt, Artificial Sequence
  Chemically synthesized
ugcuugaacucauuguuccag

SEQ ID NO: 77454 - RNA, 21 nt, Artificial Sequence
  Chemically synthesized
caucaugauacuuguugcucu

SEQ ID NO: 77455 - RNA, 21 nt, Artificial Sequence
  Chemically synthesized
gccuaaaauccauuuccaagc

SEQ ID NO: 77456 - RNA, 21 nt, Artificial Sequence
  Chemically synthesized
ccaggcugagaaagaagacga

SEQ ID NO: 77457 - RNA, 21 nt, Artificial Sequence
  Chemically synthesized
ucaagacuaaagccagagaga

SEQ ID NO: 77458 - RNA, 21 nt, Artificial Sequence
  Chemically synthesized
guugagguagcucucguuagg

SEQ ID NO: 77459 - RNA, 21 nt, Artificial Sequence
  Chemically synthesized
guaauggaaagacuccuccuc

SEQ ID NO: 77460 - RNA, 21 nt, Artificial Sequence
  Chemically synthesized
cucuucauaccaguagaacgu

SEQ ID NO: 77461 - RNA, 21 nt, Artificial Sequence
  Chemically synthesized
guuaguaagggcuucccuagu

SEQ ID NO: 77462 - RNA, 21 nt, Artificial Sequence
  Chemically synthesized
cuguaaucacgucaguauuuu

SEQ ID NO: 77463 - RNA, 21 nt, Artificial Sequence
  Chemically synthesized
agcuaugugaagagccugauu

SEQ ID NO: 77464 - RNA, 21 nt, Artificial Sequence
  Chemically synthesized
cagccgguaagaaauauauga

SEQ ID NO: 77465 - RNA, 21 nt, Artificial Sequence
  Chemically synthesized
ugccucacugcauuuguacca

SEQ ID NO: 77466 - RNA, 21 nt, Artificial Sequence
  Chemically synthesized
uuaccaccuugguaaugacaa

SEQ ID NO: 77467 - RNA, 21 nt, Artificial Sequence
  Chemically synthesized
ugguaaugacaacuucuuguu

SEQ ID NO: 77468 - RNA, 21 nt, Artificial Sequence
  Chemically synthesized
cggcugucaggaaauuucuuc

SEQ ID NO: 77469 - RNA, 21 nt, Artificial Sequence
  Chemically synthesized
acuccuccucuucauaccagu

SEQ ID NO: 77470 - RNA, 21 nt, Artificial Sequence
  Chemically synthesized
ugguauaguguacuguucaca

SEQ ID NO: 77471 - RNA, 21 nt, Artificial Sequence
  Chemically synthesized
uuauucccagccaugagagua

SEQ ID NO: 77472 - RNA, 21 nt, Artificial Sequence
  Chemically synthesized
agcucuccuuguuguaauaga

SEQ ID NO: 77473 - RNA, 21 nt, Artificial Sequence
  Chemically synthesized
cugcuuuaagccuguaaucac

SEQ ID NO: 77474 - RNA, 21 nt, Artificial Sequence
  Chemically synthesized
ucgucccaguguaaagcuaug

SEQ ID NO: 77475 - RNA, 21 nt, Artificial Sequence
  Chemically synthesized
ugugcacgcugaaaaagucuu

SEQ ID NO: 77476 - RNA, 21 nt, Artificial Sequence
  Chemically synthesized
uggcuuaccaccuugguaaug

SEQ ID NO: 77477 - RNA, 21 nt, Artificial Sequence
  Chemically synthesized
uacaagaccacagggccuaaa

SEQ ID NO: 77478 - RNA, 21 nt, Artificial Sequence
  Chemically synthesized
ugagaaagaagacgaugaaaa

SEQ ID NO: 77479 - RNA, 21 nt, Artificial Sequence
  Chemically synthesized
caugguguguguaccagaaca

SEQ ID NO: 77480 - RNA, 21 nt, Artificial Sequence
  Chemically synthesized
aaaugcgccacgauguggaug

SEQ ID NO: 77481 - RNA, 21 nt, Artificial Sequence
  Chemically synthesized
ucccaacugggagcucauauc

SEQ ID NO: 77482 - RNA, 21 nt, Artificial Sequence
  Chemically synthesized
uaucaacaggccgucacagga

SEQ ID NO: 77483 - RNA, 21 nt, Artificial Sequence
  Chemically synthesized
aucaacaggccgucacaggaa

SEQ ID NO: 77484 - RNA, 21 nt, Artificial Sequence
  Chemically synthesized
cucuccuuguuguaauagaaa

SEQ ID NO: 77485 - RNA, 21 nt, Artificial Sequence
  Chemically synthesized
gugaaguuccaggacuccaga

SEQ ID NO: 77486 - RNA, 21 nt, Artificial Sequence
  Chemically synthesized
ugacaacuucuuguugaaauc

SEQ ID NO: 77487 - RNA, 21 nt, Artificial Sequence
  Chemically synthesized
uuuauucccagccaugagagu

SEQ ID NO: 77488 - RNA, 21 nt, Artificial Sequence
  Chemically synthesized
agccaugagaguacuaauaug

SEQ ID NO: 77489 - RNA, 21 nt, Artificial Sequence
  Chemically synthesized
cucacucauccguguuuccag

SEQ ID NO: 77490 - RNA, 21 nt, Artificial Sequence
  Chemically synthesized
ucauccguguuuccagggaga

SEQ ID NO: 77491 - RNA, 21 nt, Artificial Sequence
  Chemically synthesized
aguagaaauacaccuugcuca

SEQ ID NO: 77492 - RNA, 21 nt, Artificial Sequence
  Chemically synthesized
aggccugucugaugaacucag

SEQ ID NO: 77493 - RNA, 21 nt, Artificial Sequence
  Chemically synthesized
acucaguugacgaggucauga

SEQ ID NO: 77494 - RNA, 21 nt, Artificial Sequence
  Chemically synthesized
caguugacgaggucaugauca

SEQ ID NO: 77495 - RNA, 21 nt, Artificial Sequence
  Chemically synthesized
cguguguaauggaaagacucc

SEQ ID NO: 77496 - RNA, 21 nt, Artificial Sequence
  Chemically synthesized
ugggucguuaguaagggcuuc

SEQ ID NO: 77497 - RNA, 21 nt, Artificial Sequence
  Chemically synthesized
aaguguccucgagagagcuuu

SEQ ID NO: 77498 - RNA, 21 nt, Artificial Sequence
  Chemically synthesized
aucugucagggcaguuccaaa

SEQ ID NO: 77499 - RNA, 21 nt, Artificial Sequence
  Chemically synthesized
agacugucuuggguuuggccu

SEQ ID NO: 77500 - RNA, 21 nt, Artificial Sequence
  Chemically synthesized
ccugucugaugaacucaguug

SEQ ID NO: 77501 - RNA, 21 nt, Artificial Sequence
  Chemically synthesized
aagggcuucccuaguaaauua

SEQ ID NO: 77502 - RNA, 21 nt, Artificial Sequence
  Chemically synthesized
caaaauaacucguguguaaug

SEQ ID NO: 77503 - RNA, 21 nt, Artificial Sequence
  Chemically synthesized
gacuccuccucuucauaccag

SEQ ID NO: 77504 - RNA, 21 nt, Artificial Sequence
  Chemically synthesized
ccucuucauaccaguagaacg

SEQ ID NO: 77505 - RNA, 21 nt, Artificial Sequence
  Chemically synthesized
auaagcuaaggaaguauggua

SEQ ID NO: 77506 - RNA, 21 nt, Artificial Sequence
  Chemically synthesized
cuggacuugaccuccaaaguc

SEQ ID NO: 77507 - RNA, 21 nt, Artificial Sequence
  Chemically synthesized
aguguccucgagagagcuuua

SEQ ID NO: 77508 - RNA, 21 nt, Artificial Sequence
  Chemically synthesized
cuaauaugguggagagacccu

SEQ ID NO: 77509 - RNA, 21 nt, Artificial Sequence
  Chemically synthesized
caguauuuucgucccagugua

SEQ ID NO: 77510 - RNA, 21 nt, Artificial Sequence
  Chemically synthesized
uggagagacccucauucaaaa

SEQ ID NO: 77511 - RNA, 21 nt, Artificial Sequence
  Chemically synthesized
gucugugccucacugcauuug

SEQ ID NO: 77512 - RNA, 21 nt, Artificial Sequence
  Chemically synthesized
aaucgccagaaccuaauuauu

SEQ ID NO: 77513 - RNA, 21 nt, Artificial Sequence
  Chemically synthesized
gccagaaccuaauuauucuuu

SEQ ID NO: 77514 - RNA, 21 nt, Artificial Sequence
  Chemically synthesized
cauucugcauagcggucucua

SEQ ID NO: 77515 - RNA, 21 nt, Artificial Sequence
  Chemically synthesized
gauguugugcagagagagacu

SEQ ID NO: 77516 - RNA, 21 nt, Artificial Sequence
  Chemically synthesized
caacucauaggaggccugucu

SEQ ID NO: 77517 - RNA, 21 nt, Artificial Sequence
  Chemically synthesized
gucugaugaacucaguugacg

SEQ ID NO: 77518 - RNA, 21 nt, Artificial Sequence
  Chemically synthesized
acgaggucaugaucaagacua

SEQ ID NO: 77519 - RNA, 21 nt, Artificial Sequence
  Chemically synthesized
uaggcgaccaguuugugaaau

SEQ ID NO: 77520 - RNA, 21 nt, Artificial Sequence
  Chemically synthesized
aagguuucgacugacagguau

SEQ ID NO: 77521 - RNA, 21 nt, Artificial Sequence
  Chemically synthesized
cuggauguugggucguuagua

SEQ ID NO: 77522 - RNA, 21 nt, Artificial Sequence
  Chemically synthesized
aguguugaacccaaaauaacu

SEQ ID NO: 77523 - RNA, 21 nt, Artificial Sequence
  Chemically synthesized
gcucauaucaacaggccguca

SEQ ID NO: 77524 - RNA, 21 nt, Artificial Sequence
  Chemically synthesized
aggaauuccugguggaguucu

SEQ ID NO: 77525 - RNA, 21 nt, Artificial Sequence
  Chemically synthesized
ccuccaaagucuagaagcucu

SEQ ID NO: 77526 - RNA, 21 nt, Artificial Sequence
  Chemically synthesized
gcuugaacucauuguuccagu

SEQ ID NO: 77527 - RNA, 21 nt, Artificial Sequence
  Chemically synthesized
uucaucccagccgguaagaaa

SEQ ID NO: 77528 - RNA, 21 nt, Artificial Sequence
  Chemically synthesized
gccgguaagaaauauaugaua

SEQ ID NO: 77529 - RNA, 21 nt, Artificial Sequence
  Chemically synthesized
agaucagcaaaccacucaaaa

SEQ ID NO: 77530 - RNA, 21 nt, Artificial Sequence
  Chemically synthesized
ccacucaaaagcucuugcauc

SEQ ID NO: 77531 - RNA, 21 nt, Artificial Sequence
  Chemically synthesized
ugccacuccagcgaagauaug

SEQ ID NO: 77532 - RNA, 21 nt, Artificial Sequence
  Chemically synthesized
cauaggaggccugucugauga

SEQ ID NO: 77533 - RNA, 21 nt, Artificial Sequence
  Chemically synthesized
aggaggccugucugaugaacu

SEQ ID NO: 77534 - RNA, 21 nt, Artificial Sequence
  Chemically synthesized
ugucuggauguugggucguua

SEQ ID NO: 77535 - RNA, 21 nt, Artificial Sequence
  Chemically synthesized
ucgacugacagguauuagaau

SEQ ID NO: 77536 - RNA, 21 nt, Artificial Sequence
  Chemically synthesized
acugggagcucauaucaacag

SEQ ID NO: 77537 - RNA, 21 nt, Artificial Sequence
  Chemically synthesized
aacaggccgucacaggaauuc

SEQ ID NO: 77538 - RNA, 21 nt, Artificial Sequence
  Chemically synthesized
acaaugccuggacuugaccuc

SEQ ID NO: 77539 - RNA, 21 nt, Artificial Sequence
  Chemically synthesized
cacagaagaacacgccaauac

SEQ ID NO: 77540 - RNA, 21 nt, Artificial Sequence
  Chemically synthesized
ccucccauagaaggucuucug

SEQ ID NO: 77541 - RNA, 21 nt, Artificial Sequence
  Chemically synthesized
aucccagccgguaagaaauau

SEQ ID NO: 77542 - RNA, 21 nt, Artificial Sequence
  Chemically synthesized
ggguagugaaauacaucuguc

SEQ ID NO: 77543 - RNA, 21 nt, Artificial Sequence
  Chemically synthesized
acaucugucagggcaguucca

SEQ ID NO: 77544 - RNA, 21 nt, Artificial Sequence
  Chemically synthesized
accaccuugguaaugacaacu

SEQ ID NO: 77545 - RNA, 21 nt, Artificial Sequence
  Chemically synthesized
ugacgccugcuauuguccuua

SEQ ID NO: 77546 - RNA, 21 nt, Artificial Sequence
  Chemically synthesized
agugguagcguuccagguuga

SEQ ID NO: 77547 - RNA, 21 nt, Artificial Sequence
  Chemically synthesized
cguuaguaagggcuucccuag

SEQ ID NO: 77548 - RNA, 21 nt, Artificial Sequence
  Chemically synthesized
agagcuuuagguccacagaag

SEQ ID NO: 77549 - RNA, 21 nt, Artificial Sequence
  Chemically synthesized
cucauuguuccaguugggccu

SEQ ID NO: 77550 - RNA, 21 nt, Artificial Sequence
  Chemically synthesized
cuucugcuuuaagccuguaau

SEQ ID NO: 77551 - RNA, 21 nt, Artificial Sequence
  Chemically synthesized
ugauuuucaucccagccggua

SEQ ID NO: 77552 - RNA, 21 nt, Artificial Sequence
  Chemically synthesized
uccguguuuccagggagagua

SEQ ID NO: 77553 - RNA, 21 nt, Artificial Sequence
  Chemically synthesized
cucacugcauuuguaccauau

SEQ ID NO: 77554 - RNA, 21 nt, Artificial Sequence
  Chemically synthesized
acacacacuggguagugaaau

SEQ ID NO: 77555 - RNA, 21 nt, Artificial Sequence
  Chemically synthesized
gauacuuguugcucuucggcu

SEQ ID NO: 77556 - RNA, 21 nt, Artificial Sequence
  Chemically synthesized
ugcucuucggcugucaggaaa

SEQ ID NO: 77557 - RNA, 21 nt, Artificial Sequence
  Chemically synthesized
agaaaugcgccacgaugugga

SEQ ID NO: 77558 - RNA, 21 nt, Artificial Sequence
  Chemically synthesized
caacugggagcucauaucaac

SEQ ID NO: 77559 - RNA, 21 nt, Artificial Sequence
  Chemically synthesized
aguauuuucgucccaguguaa

SEQ ID NO: 77560 - RNA, 21 nt, Artificial Sequence
  Chemically synthesized
caucccggcaaauccaguaga

SEQ ID NO: 77561 - RNA, 21 nt, Artificial Sequence
  Chemically synthesized
aauacaucugucagggcaguu

SEQ ID NO: 77562 - RNA, 21 nt, Artificial Sequence
  Chemically synthesized
acaugguguguguaccagaac

SEQ ID NO: 77563 - RNA, 21 nt, Artificial Sequence
  Chemically synthesized
uguguaccagaacaacucaua

SEQ ID NO: 77564 - RNA, 21 nt, Artificial Sequence
  Chemically synthesized
guggaugguugcauuaacagc

SEQ ID NO: 77565 - RNA, 21 nt, Artificial Sequence
  Chemically synthesized
guugcauuaacagcuauccca

SEQ ID NO: 77566 - RNA, 21 nt, Artificial Sequence
  Chemically synthesized
ugcauuaacagcuaucccaua

SEQ ID NO: 77567 - RNA, 21 nt, Artificial Sequence
  Chemically synthesized
gcaaauacuuguuccucuuau

SEQ ID NO: 77568 - RNA, 21 nt, Artificial Sequence
  Chemically synthesized
ugcaguuaaaauucaggcaca

SEQ ID NO: 77569 - RNA, 21 nt, Artificial Sequence
  Chemically synthesized
acccaaaauaacucgugugua

SEQ ID NO: 77570 - RNA, 21 nt, Artificial Sequence
  Chemically synthesized
accaguagaacgugucaauaa

SEQ ID NO: 77571 - RNA, 21 nt, Artificial Sequence
  Chemically synthesized
caaagucuagaagcucuccuu

SEQ ID NO: 77572 - RNA, 21 nt, Artificial Sequence
  Chemically synthesized
ugaauacaaguggcacaucuu

SEQ ID NO: 77573 - RNA, 21 nt, Artificial Sequence
  Chemically synthesized
aguggcacaucuuuugaagug

SEQ ID NO: 77574 - RNA, 21 nt, Artificial Sequence
  Chemically synthesized
uggcgccauuuuaaagccacg

SEQ ID NO: 77575 - RNA, 21 nt, Artificial Sequence
  Chemically synthesized
cuucuuguugaaaucgccaga

SEQ ID NO: 77576 - RNA, 21 nt, Artificial Sequence
  Chemically synthesized
accacagggccuaaaauccau

SEQ ID NO: 77577 - RNA, 21 nt, Artificial Sequence
  Chemically synthesized
auugggccacugucugccauu

SEQ ID NO: 77578 - RNA, 21 nt, Artificial Sequence
  Chemically synthesized
acgaugaaaacauggugugug

SEQ ID NO: 77579 - RNA, 21 nt, Artificial Sequence
  Chemically synthesized
aacaugguguguguaccagaa

SEQ ID NO: 77580 - RNA, 21 nt, Artificial Sequence
  Chemically synthesized
gucuggauguugggucguuag

SEQ ID NO: 77581 - RNA, 21 nt, Artificial Sequence
  Chemically synthesized
caguguugaacccaaaauaac

SEQ ID NO: 77582 - RNA, 21 nt, Artificial Sequence
  Chemically synthesized
caguagaacgugucaauaaac

SEQ ID NO: 77583 - RNA, 21 nt, Artificial Sequence
  Chemically synthesized
cccaacugggagcucauauca

SEQ ID NO: 77584 - RNA, 21 nt, Artificial Sequence
  Chemically synthesized
uccugguggaguucuuuggaa

SEQ ID NO: 77585 - RNA, 21 nt, Artificial Sequence
  Chemically synthesized
ugguggaguucuuuggaauca

SEQ ID NO: 77586 - RNA, 21 nt, Artificial Sequence
  Chemically synthesized
cacaaugccuggacuugaccu

SEQ ID NO: 77587 - RNA, 21 nt, Artificial Sequence
  Chemically synthesized
cuuuugaaguguccucgagag

SEQ ID NO: 77588 - RNA, 21 nt, Artificial Sequence
  Chemically synthesized
guguccucgagagagcuuuag

SEQ ID NO: 77589 - RNA, 21 nt, Artificial Sequence
  Chemically synthesized
uguuuccagggagaguaagag

SEQ ID NO: 77590 - RNA, 21 nt, Artificial Sequence
  Chemically synthesized
gagaguaagagaucagcaaac

SEQ ID NO: 77591 - RNA, 21 nt, Artificial Sequence
  Chemically synthesized
cacacuggguagugaaauaca

SEQ ID NO: 77592 - RNA, 21 nt, Artificial Sequence
  Chemically synthesized
acugcccuggcgccauuuuaa

SEQ ID NO: 77593 - RNA, 21 nt, Artificial Sequence
  Chemically synthesized
cacagggccuaaaauccauuu

SEQ ID NO: 77594 - RNA, 21 nt, Artificial Sequence
  Chemically synthesized
guauuagaauuagcaugcagu

SEQ ID NO: 77595 - RNA, 21 nt, Artificial Sequence
  Chemically synthesized
ggaaguaugguauaguguacu

SEQ ID NO: 77596 - RNA, 21 nt, Artificial Sequence
  Chemically synthesized
ugccuggacuugaccuccaaa

SEQ ID NO: 77597 - RNA, 21 nt, Artificial Sequence
  Chemically synthesized
aagccuguaaucacgucagua

SEQ ID NO: 77598 - RNA, 21 nt, Artificial Sequence
  Chemically synthesized
gacccucauucaaaauccagc

SEQ ID NO: 77599 - RNA, 21 nt, Artificial Sequence
  Chemically synthesized
ccauauagauuucagaagagc

SEQ ID NO: 77600 - RNA, 21 nt, Artificial Sequence
  Chemically synthesized
cuuaccaccuugguaaugaca

SEQ ID NO: 77601 - RNA, 21 nt, Artificial Sequence
  Chemically synthesized
gaaagaagacgaugaaaacau

SEQ ID NO: 77602 - RNA, 21 nt, Artificial Sequence
  Chemically synthesized
ugguagcguuccagguugaag

SEQ ID NO: 77603 - RNA, 21 nt, Artificial Sequence
  Chemically synthesized
uagcguuccagguugaagaaa

SEQ ID NO: 77604 - RNA, 21 nt, Artificial Sequence
  Chemically synthesized
agcguuccagguugaagaaau

SEQ ID NO: 77605 - RNA, 21 nt, Artificial Sequence
  Chemically synthesized
cgguccucugcagcaaauacu

SEQ ID NO: 77606 - RNA, 21 nt, Artificial Sequence
  Chemically synthesized
gccaguguugaacccaaaaua

SEQ ID NO: 77607 - RNA, 21 nt, Artificial Sequence
  Chemically synthesized
ccuccucuucauaccaguaga

SEQ ID NO: 77608 - RNA, 21 nt, Artificial Sequence
  Chemically synthesized
agcucauaucaacaggccguc

SEQ ID NO: 77609 - RNA, 21 nt, Artificial Sequence
  Chemically synthesized
ucccagccaugagaguacuaa

SEQ ID NO: 77610 - RNA, 21 nt, Artificial Sequence
  Chemically synthesized
agucuagaagcucuccuuguu

SEQ ID NO: 77611 - RNA, 21 nt, Artificial Sequence
  Chemically synthesized
gucagcugaugaauacaagug

SEQ ID NO: 77612 - RNA, 21 nt, Artificial Sequence
  Chemically synthesized
gcaaucugcuugaacucauug

SEQ ID NO: 77613 - RNA, 21 nt, Artificial Sequence
  Chemically synthesized
cccucauucaaaauccagcac

SEQ ID NO: 77614 - RNA, 21 nt, Artificial Sequence
  Chemically synthesized
uaccaccuugguaaugacaac

SEQ ID NO: 77615 - RNA, 21 nt, Artificial Sequence
  Chemically synthesized
cugcauagcggucucuacaga

SEQ ID NO: 77616 - RNA, 21 nt, Artificial Sequence
  Chemically synthesized
auggauggccaggcugagaaa

SEQ ID NO: 77617 - RNA, 21 nt, Artificial Sequence
  Chemically synthesized
acaacucauaggaggccuguc

SEQ ID NO: 77618 - RNA, 21 nt, Artificial Sequence
  Chemically synthesized
cucauaggaggccugucugau

SEQ ID NO: 77619 - RNA, 21 nt, Artificial Sequence
  Chemically synthesized
caggaaauuucuucucccuca

SEQ ID NO: 77620 - RNA, 21 nt, Artificial Sequence
  Chemically synthesized
ggucaugaucaagacuaaagc

SEQ ID NO: 77621 - RNA, 21 nt, Artificial Sequence
  Chemically synthesized
gaagaaaugcgccacgaugug

SEQ ID NO: 77622 - RNA, 21 nt, Artificial Sequence
  Chemically synthesized
cagccaugagaguacuaauau

SEQ ID NO: 77623 - RNA, 21 nt, Artificial Sequence
  Chemically synthesized
cugaugaauacaaguggcaca

SEQ ID NO: 77624 - RNA, 21 nt, Artificial Sequence
  Chemically synthesized
aggcaaucugcuugaacucau

SEQ ID NO: 77625 - RNA, 21 nt, Artificial Sequence
  Chemically synthesized
guacuaauaugguggagagac

SEQ ID NO: 77626 - RNA, 21 nt, Artificial Sequence
  Chemically synthesized
cauagaaggucuucugcuuua

SEQ ID NO: 77627 - RNA, 21 nt, Artificial Sequence
  Chemically synthesized
acaagaccacagggccuaaaa

SEQ ID NO: 77628 - RNA, 21 nt, Artificial Sequence
  Chemically synthesized
aggugauguugugcagagaga

SEQ ID NO: 77629 - RNA, 21 nt, Artificial Sequence
  Chemically synthesized
cuuggguuuggccucgaacaa

SEQ ID NO: 77630 - RNA, 21 nt, Artificial Sequence
  Chemically synthesized
guccuuagcaauucagugguu

SEQ ID NO: 77631 - RNA, 21 nt, Artificial Sequence
  Chemically synthesized
cacgauguggaugguugcauu

SEQ ID NO: 77632 - RNA, 21 nt, Artificial Sequence
  Chemically synthesized
ccaguuugugaaaucugaggu

SEQ ID NO: 77633 - RNA, 21 nt, Artificial Sequence
  Chemically synthesized
caaauacuuguuccucuuaug

SEQ ID NO: 77634 - RNA, 21 nt, Artificial Sequence
  Chemically synthesized
acuuguuccucuuaugaauga

SEQ ID NO: 77635 - RNA, 21 nt, Artificial Sequence
  Chemically synthesized
acaggaauuccugguggaguu

SEQ ID NO: 77636 - RNA, 21 nt, Artificial Sequence
  Chemically synthesized
gagagagcuuuagguccacag

SEQ ID NO: 77637 - RNA, 21 nt, Artificial Sequence
  Chemically synthesized
ucccagccgguaagaaauaua

SEQ ID NO: 77638 - RNA, 21 nt, Artificial Sequence
  Chemically synthesized
gcucacucauccguguuucca

SEQ ID NO: 77639 - RNA, 21 nt, Artificial Sequence
  Chemically synthesized
ugcaucccggcaaauccagua

SEQ ID NO: 77640 - RNA, 21 nt, Artificial Sequence
  Chemically synthesized
gugccucacugcauuuguacc

SEQ ID NO: 77641 - RNA, 21 nt, Artificial Sequence
  Chemically synthesized
cugcccuggcgccauuuuaaa

SEQ ID NO: 77642 - RNA, 21 nt, Artificial Sequence
  Chemically synthesized
acucauaggaggccugucuga

SEQ ID NO: 77643 - RNA, 21 nt, Artificial Sequence
  Chemically synthesized
guugacgaggucaugaucaag

SEQ ID NO: 77644 - RNA, 21 nt, Artificial Sequence
  Chemically synthesized
aggaaauuucuucucccucac

SEQ ID NO: 77645 - RNA, 21 nt, Artificial Sequence
  Chemically synthesized
aggucaugaucaagacuaaag

SEQ ID NO: 77646 - RNA, 21 nt, Artificial Sequence
  Chemically synthesized
auaggcgaccaguuugugaaa

SEQ ID NO: 77647 - RNA, 21 nt, Artificial Sequence
  Chemically synthesized
acgguccucugcagcaaauac

SEQ ID NO: 77648 - RNA, 21 nt, Artificial Sequence
  Chemically synthesized
gguccucugcagcaaauacuu

SEQ ID NO: 77649 - RNA, 21 nt, Artificial Sequence
  Chemically synthesized
gguauuagaauuagcaugcag

SEQ ID NO: 77650 - RNA, 21 nt, Artificial Sequence
  Chemically synthesized
gguauaguguacuguucacaa

SEQ ID NO: 77651 - RNA, 21 nt, Artificial Sequence
  Chemically synthesized
cacaucuuuugaaguguccuc

SEQ ID NO: 77652 - RNA, 21 nt, Artificial Sequence
  Chemically synthesized
cucgagagagcuuuaggucca

SEQ ID NO: 77653 - RNA, 21 nt, Artificial Sequence
  Chemically synthesized
gcuuuaagccuguaaucacgu

SEQ ID NO: 77654 - RNA, 21 nt, Artificial Sequence
  Chemically synthesized
guauuuucgucccaguguaaa

SEQ ID NO: 77655 - RNA, 21 nt, Artificial Sequence
  Chemically synthesized
gagccugauuuucaucccagc

SEQ ID NO: 77656 - RNA, 21 nt, Artificial Sequence
  Chemically synthesized
aagcucuugcaucccggcaaa

SEQ ID NO: 77657 - RNA, 21 nt, Artificial Sequence
  Chemically synthesized
ccucacugcauuuguaccaua

SEQ ID NO: 77658 - RNA, 21 nt, Artificial Sequence
  Chemically synthesized
guaccauauagauuucagaag

SEQ ID NO: 77659 - RNA, 21 nt, Artificial Sequence
  Chemically synthesized
agagagagacugucuuggguu

SEQ ID NO: 77660 - RNA, 21 nt, Artificial Sequence
  Chemically synthesized
cuuagcaauucagugguugug

SEQ ID NO: 77661 - RNA, 21 nt, Artificial Sequence
  Chemically synthesized
accugugucuggauguugggu

SEQ ID NO: 77662 - RNA, 21 nt, Artificial Sequence
  Chemically synthesized
gauguugggucguuaguaagg

SEQ ID NO: 77663 - RNA, 21 nt, Artificial Sequence
  Chemically synthesized
ccaguguugaacccaaaauaa

SEQ ID NO: 77664 - RNA, 21 nt, Artificial Sequence
  Chemically synthesized
aagcuaaggaaguaugguaua

SEQ ID NO: 77665 - RNA, 21 nt, Artificial Sequence
  Chemically synthesized
acuugaccuccaaagucuaga

SEQ ID NO: 77666 - RNA, 21 nt, Artificial Sequence
  Chemically synthesized
guccucgagagagcuuuaggu

SEQ ID NO: 77667 - RNA, 21 nt, Artificial Sequence
  Chemically synthesized
caaucugcuugaacucauugu

SEQ ID NO: 77668 - RNA, 21 nt, Artificial Sequence
  Chemically synthesized
gccuguaaucacgucaguauu

SEQ ID NO: 77669 - RNA, 21 nt, Artificial Sequence
  Chemically synthesized
uuucaucccagccgguaagaa

SEQ ID NO: 77670 - RNA, 21 nt, Artificial Sequence
  Chemically synthesized
auccguguuuccagggagagu

SEQ ID NO: 77671 - RNA, 21 nt, Artificial Sequence
  Chemically synthesized
acacacacacuggguagugaa

SEQ ID NO: 77672 - RNA, 21 nt, Artificial Sequence
  Chemically synthesized
gaaaucgccagaaccuaauua

SEQ ID NO: 77673 - RNA, 21 nt, Artificial Sequence
  Chemically synthesized
ggccuaaaauccauuuccaag

SEQ ID NO: 77674 - RNA, 21 nt, Artificial Sequence
  Chemically synthesized
guuuggccucgaacaauccga

SEQ ID NO: 77675 - RNA, 21 nt, Artificial Sequence
  Chemically synthesized
cugcuauuguccuuagcaauu

SEQ ID NO: 77676 - RNA, 21 nt, Artificial Sequence
  Chemically synthesized
cagcaaaccacucaaaagcuc

SEQ ID NO: 77677 - RNA, 21 nt, Artificial Sequence
  Chemically synthesized
cugcauuuguaccauauagau

SEQ ID NO: 77678 - RNA, 21 nt, Artificial Sequence
  Chemically synthesized
gcacgcugaaaaagucuuccu

SEQ ID NO: 77679 - RNA, 21 nt, Artificial Sequence
  Chemically synthesized
cauuuuaaagccacgcuuuuu

SEQ ID NO: 77680 - RNA, 21 nt, Artificial Sequence
  Chemically synthesized
ccuugguaaugacaacuucuu

SEQ ID NO: 77681 - RNA, 21 nt, Artificial Sequence
  Chemically synthesized
cacugucugccauucugcaua

SEQ ID NO: 77682 - RNA, 21 nt, Artificial Sequence
  Chemically synthesized
gugauguugugcagagagaga

SEQ ID NO: 77683 - RNA, 21 nt, Artificial Sequence
  Chemically synthesized
uggccaggcugagaaagaaga

SEQ ID NO: 77684 - RNA, 21 nt, Artificial Sequence
  Chemically synthesized
gcauuaacagcuaucccauag

SEQ ID NO: 77685 - RNA, 21 nt, Artificial Sequence
  Chemically synthesized
gaauacaaguggcacaucuuu

SEQ ID NO: 77686 - RNA, 21 nt, Artificial Sequence
  Chemically synthesized
guccacagaagaacacgccaa

SEQ ID NO: 77687 - RNA, 21 nt, Artificial Sequence
  Chemically synthesized
ugauaacucagaaagugaguu

SEQ ID NO: 77688 - RNA, 21 nt, Artificial Sequence
  Chemically synthesized
accacucaaaagcucuugcau

SEQ ID NO: 77689 - RNA, 21 nt, Artificial Sequence
  Chemically synthesized
aaauacaucugucagggcagu

SEQ ID NO: 77690 - RNA, 21 nt, Artificial Sequence
  Chemically synthesized
cgccauuuuaaagccacgcuu

SEQ ID NO: 77691 - RNA, 21 nt, Artificial Sequence
  Chemically synthesized
cacaugcauacaagaccacag

SEQ ID NO: 77692 - RNA, 21 nt, Artificial Sequence
  Chemically synthesized
ggugauguugugcagagagag

SEQ ID NO: 77693 - RNA, 21 nt, Artificial Sequence
  Chemically synthesized
guguguaccagaacaacucau

SEQ ID NO: 77694 - RNA, 21 nt, Artificial Sequence
  Chemically synthesized
cuaucccauaggcgaccaguu

SEQ ID NO: 77695 - RNA, 21 nt, Artificial Sequence
  Chemically synthesized
aagccaguguugaacccaaaa

SEQ ID NO: 77696 - RNA, 21 nt, Artificial Sequence
  Chemically synthesized
agccaguguugaacccaaaau

SEQ ID NO: 77697 - RNA, 21 nt, Artificial Sequence
  Chemically synthesized
cauaccaguagaacgugucaa

SEQ ID NO: 77698 - RNA, 21 nt, Artificial Sequence
  Chemically synthesized
cacaggaauuccugguggagu

SEQ ID NO: 77699 - RNA, 21 nt, Artificial Sequence
  Chemically synthesized
augccuggacuugaccuccaa

SEQ ID NO: 77700 - RNA, 21 nt, Artificial Sequence
  Chemically synthesized
cggcaaauccaguagaaauac

SEQ ID NO: 77701 - RNA, 21 nt, Artificial Sequence
  Chemically synthesized
ccacagggccuaaaauccauu

SEQ ID NO: 77702 - RNA, 21 nt, Artificial Sequence
  Chemically synthesized
ggugauuguaggcaaucugcu

SEQ ID NO: 77703 - RNA, 21 nt, Artificial Sequence
  Chemically synthesized
gugauuguaggcaaucugcuu

SEQ ID NO: 77704 - RNA, 21 nt, Artificial Sequence
  Chemically synthesized
ccauagaaggucuucugcuuu

SEQ ID NO: 77705 - RNA, 21 nt, Artificial Sequence
  Chemically synthesized
guggagagacccucauucaaa

SEQ ID NO: 77706 - RNA, 21 nt, Artificial Sequence
  Chemically synthesized
cugugccucacugcauuugua

SEQ ID NO: 77707 - RNA, 21 nt, Artificial Sequence
  Chemically synthesized
cacuggguagugaaauacauc

SEQ ID NO: 77708 - RNA, 21 nt, Artificial Sequence
  Chemically synthesized
caucugucagggcaguuccaa

SEQ ID NO: 77709 - RNA, 21 nt, Artificial Sequence
  Chemically synthesized
aguaagggcuucccuaguaaa

SEQ ID NO: 77710 - RNA, 21 nt, Artificial Sequence
  Chemically synthesized
ugucuuggguuuggccucgaa

SEQ ID NO: 77711 - RNA, 21 nt, Artificial Sequence
  Chemically synthesized
agaaagaagacgaugaaaaca

SEQ ID NO: 77712 - RNA, 21 nt, Artificial Sequence
  Chemically synthesized
augguguguguaccagaacaa

SEQ ID NO: 77713 - RNA, 21 nt, Artificial Sequence
  Chemically synthesized
gguguguguaccagaacaacu

SEQ ID NO: 77714 - RNA, 21 nt, Artificial Sequence
  Chemically synthesized
gguugagguagcucucguuag

SEQ ID NO: 77715 - RNA, 21 nt, Artificial Sequence
  Chemically synthesized
gguagcguuccagguugaaga

SEQ ID NO: 77716 - RNA, 21 nt, Artificial Sequence
  Chemically synthesized
cgacugacagguauuagaauu

SEQ ID NO: 77717 - RNA, 21 nt, Artificial Sequence
  Chemically synthesized
ccuggacuugaccuccaaagu

SEQ ID NO: 77718 - RNA, 21 nt, Artificial Sequence
  Chemically synthesized
ccagccaugagaguacuaaua

SEQ ID NO: 77719 - RNA, 21 nt, Artificial Sequence
  Chemically synthesized
ccacgcuuuuucaugugaagu

SEQ ID NO: 77720 - RNA, 21 nt, Artificial Sequence
  Chemically synthesized
ccugcuauuguccuuagcaau

SEQ ID NO: 77721 - RNA, 21 nt, Artificial Sequence
  Chemically synthesized
gcagcaaauacuuguuccucu

SEQ ID NO: 77722 - RNA, 21 nt, Artificial Sequence
  Chemically synthesized
guguacuguucacaauaguua

SEQ ID NO: 77723 - RNA, 21 nt, Artificial Sequence
  Chemically synthesized
guggaguucuuuggaaucaau

SEQ ID NO: 77724 - RNA, 21 nt, Artificial Sequence
  Chemically synthesized
cuagaagcucuccuuguugua

SEQ ID NO: 77725 - RNA, 21 nt, Artificial Sequence
  Chemically synthesized
gcucuccuuguuguaauagaa

SEQ ID NO: 77726 - RNA, 21 nt, Artificial Sequence
  Chemically synthesized
cgagagagcuuuagguccaca

SEQ ID NO: 77727 - RNA, 21 nt, Artificial Sequence
  Chemically synthesized
cgucaguauuuucgucccagu

SEQ ID NO: 77728 - RNA, 21 nt, Artificial Sequence
  Chemically synthesized
ucacugcauuuguaccauaua

SEQ ID NO: 77729 - RNA, 21 nt, Artificial Sequence
  Chemically synthesized
gccauuuuaaagccacgcuuu

SEQ ID NO: 77730 - RNA, 21 nt, Artificial Sequence
  Chemically synthesized
cagaaggugauguugugcaga

SEQ ID NO: 77731 - RNA, 21 nt, Artificial Sequence
  Chemically synthesized
gaaaucugagguuuuugucua

SEQ ID NO: 77732 - RNA, 21 nt, Artificial Sequence
  Chemically synthesized
ucacaggaauuccugguggag

SEQ ID NO: 77733 - RNA, 21 nt, Artificial Sequence
  Chemically synthesized
acaaguggcacaucuuuugaa

SEQ ID NO: 77734 - RNA, 21 nt, Artificial Sequence
  Chemically synthesized
ccacagaagaacacgccaaua

SEQ ID NO: 77735 - RNA, 21 nt, Artificial Sequence
  Chemically synthesized
cccaguguaaagcuaugugaa

SEQ ID NO: 77736 - RNA, 21 nt, Artificial Sequence
  Chemically synthesized
guaaagcuaugugaagagccu

SEQ ID NO: 77737 - RNA, 21 nt, Artificial Sequence
  Chemically synthesized
ccagggagaguaagagaucag

SEQ ID NO: 77738 - RNA, 21 nt, Artificial Sequence
  Chemically synthesized
agagaucagcaaaccacucaa

SEQ ID NO: 77739 - RNA, 21 nt, Artificial Sequence
  Chemically synthesized
gugccacuccagcgaagauau

SEQ ID NO: 77740 - RNA, 21 nt, Artificial Sequence
  Chemically synthesized
ggcacugcaccaagauguacu

SEQ ID NO: 77741 - RNA, 21 nt, Artificial Sequence
  Chemically synthesized
cucuucggcugucaggaaauu

SEQ ID NO: 77742 - RNA, 21 nt, Artificial Sequence
  Chemically synthesized
cuccuccucuucauaccagua

SEQ ID NO: 77743 - RNA, 21 nt, Artificial Sequence
  Chemically synthesized
cugguggaguucuuuggaauc

SEQ ID NO: 77744 - RNA, 21 nt, Artificial Sequence
  Chemically synthesized
gcugaugaauacaaguggcac

SEQ ID NO: 77745 - RNA, 21 nt, Artificial Sequence
  Chemically synthesized
gaugaauacaaguggcacauc

SEQ ID NO: 77746 - RNA, 21 nt, Artificial Sequence
  Chemically synthesized
gaagaacacgccaauacugcu

SEQ ID NO: 77747 - RNA, 21 nt, Artificial Sequence
  Chemically synthesized
caucccagccgguaagaaaua

SEQ ID NO: 77748 - RNA, 21 nt, Artificial Sequence
  Chemically synthesized
gcaaauccaguagaaauacac

SEQ ID NO: 77749 - RNA, 21 nt, Artificial Sequence
  Chemically synthesized
acacuggguagugaaauacau

SEQ ID NO: 77750 - RNA, 21 nt, Artificial Sequence
  Chemically synthesized
aggguuccuugccagaaaauu

SEQ ID NO: 77751 - RNA, 21 nt, Artificial Sequence
  Chemically synthesized
ccauucugcauagcggucucu

SEQ ID NO: 77752 - RNA, 21 nt, Artificial Sequence
  Chemically synthesized
cucaguugacgaggucaugau

SEQ ID NO: 77753 - RNA, 21 nt, Artificial Sequence
  Chemically synthesized
gcuauuguccuuagcaauuca

SEQ ID NO: 77754 - RNA, 21 nt, Artificial Sequence
  Chemically synthesized
agcaauucagugguuguguuu

SEQ ID NO: 77755 - RNA, 21 nt, Artificial Sequence
  Chemically synthesized
acgauguggaugguugcauua

SEQ ID NO: 77756 - RNA, 21 nt, Artificial Sequence
  Chemically synthesized
gauguggaugguugcauuaac

SEQ ID NO: 77757 - RNA, 21 nt, Artificial Sequence
  Chemically synthesized
gacagguauuagaauuagcau

SEQ ID NO: 77758 - RNA, 21 nt, Artificial Sequence
  Chemically synthesized
agggcuucccuaguaaauuau

SEQ ID NO: 77759 - RNA, 21 nt, Artificial Sequence
  Chemically synthesized
gaaagacuccuccucuucaua

SEQ ID NO: 77760 - RNA, 21 nt, Artificial Sequence
  Chemically synthesized
gaguucuuuggaaucaauaac

SEQ ID NO: 77761 - RNA, 21 nt, Artificial Sequence
  Chemically synthesized
aaagcucuugcaucccggcaa

SEQ ID NO: 77762 - RNA, 21 nt, Artificial Sequence
  Chemically synthesized
ugggcacugcaccaagaugua

SEQ ID NO: 77763 - RNA, 21 nt, Artificial Sequence
  Chemically synthesized
ccaccuugguaaugacaacuu

SEQ ID NO: 77764 - RNA, 21 nt, Artificial Sequence
  Chemically synthesized
guaagggcuucccuaguaaau

SEQ ID NO: 77765 - RNA, 21 nt, Artificial Sequence
  Chemically synthesized
guugugcagagagagacuguc

SEQ ID NO: 77766 - RNA, 21 nt, Artificial Sequence
  Chemically synthesized
gagagacugucuuggguuugg

SEQ ID NO: 77767 - RNA, 21 nt, Artificial Sequence
  Chemically synthesized
gaucaagacuaaagccagaga

SEQ ID NO: 77768 - RNA, 21 nt, Artificial Sequence
  Chemically synthesized
cagcaaauacuuguuccucuu

SEQ ID NO: 77769 - RNA, 21 nt, Artificial Sequence
  Chemically synthesized
gaaaacacaaugccuggacuu

SEQ ID NO: 77770 - RNA, 21 nt, Artificial Sequence
  Chemically synthesized
cccauagaaggucuucugcuu

SEQ ID NO: 77771 - RNA, 21 nt, Artificial Sequence
  Chemically synthesized
gucuucugcuuuaagccugua

SEQ ID NO: 77772 - RNA, 21 nt, Artificial Sequence
  Chemically synthesized
agccuguaaucacgucaguau

SEQ ID NO: 77773 - RNA, 21 nt, Artificial Sequence
  Chemically synthesized
caguguaaagcuaugugaaga

SEQ ID NO: 77774 - RNA, 21 nt, Artificial Sequence
  Chemically synthesized
cguguuuccagggagaguaag

SEQ ID NO: 77775 - RNA, 21 nt, Artificial Sequence
  Chemically synthesized
ggucugugccucacugcauuu

SEQ ID NO: 77776 - RNA, 21 nt, Artificial Sequence
  Chemically synthesized
agauuucagaagagcagcgaa

SEQ ID NO: 77777 - RNA, 21 nt, Artificial Sequence
  Chemically synthesized
cgcugaaaaagucuuccuggg

SEQ ID NO: 77778 - RNA, 21 nt, Artificial Sequence
  Chemically synthesized
cuggcgccauuuuaaagccac

SEQ ID NO: 77779 - RNA, 21 nt, Artificial Sequence
  Chemically synthesized
agccacgcuuuuucaugugaa

SEQ ID NO: 77780 - RNA, 21 nt, Artificial Sequence
  Chemically synthesized
cugagaaagaagacgaugaaa

SEQ ID NO: 77781 - RNA, 23 nt, Artificial Sequence
  Chemically synthesized
gcaugugaaagaauaauuagguu

SEQ ID NO: 77782 - RNA, 23 nt, Artificial Sequence
  Chemically synthesized
ccuuauuucauucauaagaggaa

SEQ ID NO: 77783 - RNA, 23 nt, Artificial Sequence
  Chemically synthesized
uucuaugggaggcccaacuggaa

SEQ ID NO: 77784 - RNA, 23 nt, Artificial Sequence
  Chemically synthesized
guguucauuucuauuacaacaag

SEQ ID NO: 77785 - RNA, 23 nt, Artificial Sequence
  Chemically synthesized
guuuauugacacguucuacuggu

SEQ ID NO: 77786 - RNA, 23 nt, Artificial Sequence
  Chemically synthesized
gaaagaauaauuagguucuggcg

SEQ ID NO: 77787 - RNA, 23 nt, Artificial Sequence
  Chemically synthesized
uaaaauggcgccagggcaguaca

SEQ ID NO: 77788 - RNA, 23 nt, Artificial Sequence
  Chemically synthesized
ugcaugugaaagaauaauuaggu

SEQ ID NO: 77789 - RNA, 23 nt, Artificial Sequence
  Chemically synthesized
gaguuaucauauauuucuuaccg

SEQ ID NO: 77790 - RNA, 23 nt, Artificial Sequence
  Chemically synthesized
guuauugauuccaaagaacucca

SEQ ID NO: 77791 - RNA, 23 nt, Artificial Sequence
  Chemically synthesized
aaagaauaauuagguucuggcga

SEQ ID NO: 77792 - RNA, 23 nt, Artificial Sequence
  Chemically synthesized
aauuccugugacggccuguugau

SEQ ID NO: 77793 - RNA, 23 nt, Artificial Sequence
  Chemically synthesized
gaauuccugugacggccuguuga

SEQ ID NO: 77794 - RNA, 23 nt, Artificial Sequence
  Chemically synthesized
gacaaaauaauuuacuagggaag

SEQ ID NO: 77795 - RNA, 23 nt, Artificial Sequence
  Chemically synthesized
uaugggaggcccaacuggaacaa

SEQ ID NO: 77796 - RNA, 23 nt, Artificial Sequence
  Chemically synthesized
uguuuucaucgucuucuuucuca

SEQ ID NO: 77797 - RNA, 23 nt, Artificial Sequence
  Chemically synthesized
cuauuacaacaaggagagcuucu

SEQ ID NO: 77798 - RNA, 23 nt, Artificial Sequence
  Chemically synthesized
aagaccuucuaugggaggcccaa

SEQ ID NO: 77799 - RNA, 23 nt, Artificial Sequence
  Chemically synthesized
aaaauggcgccagggcaguacau

SEQ ID NO: 77800 - RNA, 23 nt, Artificial Sequence
  Chemically synthesized
gcugggaauaaauuuuuaucugu

SEQ ID NO: 77801 - RNA, 23 nt, Artificial Sequence
  Chemically synthesized
gaaguugucauuaccaagguggu

SEQ ID NO: 77802 - RNA, 23 nt, Artificial Sequence
  Chemically synthesized
gauuuugaaugagggucucucca

SEQ ID NO: 77803 - RNA, 23 nt, Artificial Sequence
  Chemically synthesized
cuuacucucccuggaaacacgga

SEQ ID NO: 77804 - RNA, 23 nt, Artificial Sequence
  Chemically synthesized
cuuuaaaauggcgccagggcagu

SEQ ID NO: 77805 - RNA, 23 nt, Artificial Sequence
  Chemically synthesized
ugaaagaauaauuagguucuggc

SEQ ID NO: 77806 - RNA, 23 nt, Artificial Sequence
  Chemically synthesized
uauuaguacucucauggcuggga

SEQ ID NO: 77807 - RNA, 23 nt, Artificial Sequence
  Chemically synthesized
auaauuuacuagggaagcccuua

SEQ ID NO: 77808 - RNA, 23 nt, Artificial Sequence
  Chemically synthesized
cauauuaguacucucauggcugg

SEQ ID NO: 77809 - RNA, 23 nt, Artificial Sequence
  Chemically synthesized
ugugaaagaauaauuagguucug

SEQ ID NO: 77810 - RNA, 23 nt, Artificial Sequence
  Chemically synthesized
augcaugugaaagaauaauuagg

SEQ ID NO: 77811 - RNA, 23 nt, Artificial Sequence
  Chemically synthesized
aacugaguucaucagacaggccu

SEQ ID NO: 77812 - RNA, 23 nt, Artificial Sequence
  Chemically synthesized
auugauuccaaagaacuccacca

SEQ ID NO: 77813 - RNA, 23 nt, Artificial Sequence
  Chemically synthesized
uuugaaugagggucucuccacca

SEQ ID NO: 77814 - RNA, 23 nt, Artificial Sequence
  Chemically synthesized
gauuuuaggcccuguggucuugu

SEQ ID NO: 77815 - RNA, 23 nt, Artificial Sequence
  Chemically synthesized
aggaauuccugugacggccuguu

SEQ ID NO: 77816 - RNA, 23 nt, Artificial Sequence
  Chemically synthesized
accuuauuucauucauaagagga

SEQ ID NO: 77817 - RNA, 23 nt, Artificial Sequence
  Chemically synthesized
aguuaucauauauuucuuaccgg

SEQ ID NO: 77818 - RNA, 23 nt, Artificial Sequence
  Chemically synthesized
agaauggcagacaguggcccaau

SEQ ID NO: 77819 - RNA, 23 nt, Artificial Sequence
  Chemically synthesized
cuucaaccuggaacgcuaccacu

SEQ ID NO: 77820 - RNA, 23 nt, Artificial Sequence
  Chemically synthesized
caugugaaagaauaauuagguuc

SEQ ID NO: 77821 - RNA, 23 nt, Artificial Sequence
  Chemically synthesized
uauuuuggguucaacacuggcuu

SEQ ID NO: 77822 - RNA, 23 nt, Artificial Sequence
  Chemically synthesized
uuauuuuggguucaacacuggcu

SEQ ID NO: 77823 - RNA, 23 nt, Artificial Sequence
  Chemically synthesized
uuuaaaauggcgccagggcagua

SEQ ID NO: 77824 - RNA, 23 nt, Artificial Sequence
  Chemically synthesized
caacagaacaaaaacauuuacug

SEQ ID NO: 77825 - RNA, 23 nt, Artificial Sequence
  Chemically synthesized
gugaaagaauaauuagguucugg

SEQ ID NO: 77826 - RNA, 23 nt, Artificial Sequence
  Chemically synthesized
aaauaauuuacuagggaagcccu

SEQ ID NO: 77827 - RNA, 23 nt, Artificial Sequence
  Chemically synthesized
uauuugcugcagaggaccgugga

SEQ ID NO: 77828 - RNA, 23 nt, Artificial Sequence
  Chemically synthesized
uaauuuacuagggaagcccuuac

SEQ ID NO: 77829 - RNA, 23 nt, Artificial Sequence
  Chemically synthesized
guuugcugaucucuuacucuccc

SEQ ID NO: 77830 - RNA, 23 nt, Artificial Sequence
  Chemically synthesized
uugaaugagggucucuccaccau

SEQ ID NO: 77831 - RNA, 23 nt, Artificial Sequence
  Chemically synthesized
aauuuacuagggaagcccuuacu

SEQ ID NO: 77832 - RNA, 23 nt, Artificial Sequence
  Chemically synthesized
uugauaugagcucccaguuggga

SEQ ID NO: 77833 - RNA, 23 nt, Artificial Sequence
  Chemically synthesized
aaagaacuccaccaggaauuccu

SEQ ID NO: 77834 - RNA, 23 nt, Artificial Sequence
  Chemically synthesized
auuugccgggaugcaagagcuuu

SEQ ID NO: 77835 - RNA, 23 nt, Artificial Sequence
  Chemically synthesized
ugaaaucuauaugguacaaaugc

SEQ ID NO: 77836 - RNA, 23 nt, Artificial Sequence
  Chemically synthesized
auuucacuacccagugugugugu

SEQ ID NO: 77837 - RNA, 23 nt, Artificial Sequence
  Chemically synthesized
aauaauuuacuagggaagcccuu

SEQ ID NO: 77838 - RNA, 23 nt, Artificial Sequence
  Chemically synthesized
gucuucuuucucagccuggccau

SEQ ID NO: 77839 - RNA, 23 nt, Artificial Sequence
  Chemically synthesized
aaguugucauuaccaagguggua

SEQ ID NO: 77840 - RNA, 23 nt, Artificial Sequence
  Chemically synthesized
guuauuuuggguucaacacuggc

SEQ ID NO: 77841 - RNA, 23 nt, Artificial Sequence
  Chemically synthesized
acaaaauaauuuacuagggaagc

SEQ ID NO: 77842 - RNA, 23 nt, Artificial Sequence
  Chemically synthesized
ccuuagcuuauaaauaacauguc

SEQ ID NO: 77843 - RNA, 23 nt, Artificial Sequence
  Chemically synthesized
uaacgagagcuaccucaacccug

SEQ ID NO: 77844 - RNA, 23 nt, Artificial Sequence
  Chemically synthesized
aaccauccacaucguggcgcauu

SEQ ID NO: 77845 - RNA, 23 nt, Artificial Sequence
  Chemically synthesized
aaguuauugauuccaaagaacuc

SEQ ID NO: 77846 - RNA, 23 nt, Artificial Sequence
  Chemically synthesized
uuaaaauggcgccagggcaguac

SEQ ID NO: 77847 - RNA, 23 nt, Artificial Sequence
  Chemically synthesized
uauuucuacuggauuugccggga

SEQ ID NO: 77848 - RNA, 23 nt, Artificial Sequence
  Chemically synthesized
uuuccugacagccgaagagcaac

SEQ ID NO: 77849 - RNA, 23 nt, Artificial Sequence
  Chemically synthesized
cuuauuucauucauaagaggaac

SEQ ID NO: 77850 - RNA, 23 nt, Artificial Sequence
  Chemically synthesized
ucuucuguggaccuaaagcucuc

SEQ ID NO: 77851 - RNA, 23 nt, Artificial Sequence
  Chemically synthesized
uuacucucccuggaaacacggau

SEQ ID NO: 77852 - RNA, 23 nt, Artificial Sequence
  Chemically synthesized
ucuuucucagccuggccauccau

SEQ ID NO: 77853 - RNA, 23 nt, Artificial Sequence
  Chemically synthesized
cagauuucacaaacuggucgccu

SEQ ID NO: 77854 - RNA, 23 nt, Artificial Sequence
  Chemically synthesized
uaaugcaaccauccacaucgugg

SEQ ID NO: 77855 - RNA, 23 nt, Artificial Sequence
  Chemically synthesized
aacauccagacacaggugaggga

SEQ ID NO: 77856 - RNA, 23 nt, Artificial Sequence
  Chemically synthesized
gaacuccaccaggaauuccugug

SEQ ID NO: 77857 - RNA, 23 nt, Artificial Sequence
  Chemically synthesized
uauugauuccaaagaacuccacc

SEQ ID NO: 77858 - RNA, 23 nt, Artificial Sequence
  Chemically synthesized
guauuucuacuggauuugccggg

SEQ ID NO: 77859 - RNA, 23 nt, Artificial Sequence
  Chemically synthesized
cauuaccaaggugguaagccacc

SEQ ID NO: 77860 - RNA, 23 nt, Artificial Sequence
  Chemically synthesized
uguauuucuacuggauuugccgg

SEQ ID NO: 77861 - RNA, 23 nt, Artificial Sequence
  Chemically synthesized
aaccuaauuauucuuucacaugc

SEQ ID NO: 77862 - RNA, 23 nt, Artificial Sequence
  Chemically synthesized
uuccucuuaugaaugaaauaagg

SEQ ID NO: 77863 - RNA, 23 nt, Artificial Sequence
  Chemically synthesized
uuccaguugggccucccauagaa

SEQ ID NO: 77864 - RNA, 23 nt, Artificial Sequence
  Chemically synthesized
cuuguuguaauagaaaugaacac

SEQ ID NO: 77865 - RNA, 23 nt, Artificial Sequence
  Chemically synthesized
accaguagaacgugucaauaaac

SEQ ID NO: 77866 - RNA, 23 nt, Artificial Sequence
  Chemically synthesized
cgccagaaccuaauuauucuuuc

SEQ ID NO: 77867 - RNA, 23 nt, Artificial Sequence
  Chemically synthesized
uguacugcccuggcgccauuuua

SEQ ID NO: 77868 - RNA, 23 nt, Artificial Sequence
  Chemically synthesized
accuaauuauucuuucacaugca

SEQ ID NO: 77869 - RNA, 23 nt, Artificial Sequence
  Chemically synthesized
cgguaagaaauauaugauaacuc

SEQ ID NO: 77870 - RNA, 23 nt, Artificial Sequence
  Chemically synthesized
uggaguucuuuggaaucaauaac

SEQ ID NO: 77871 - RNA, 23 nt, Artificial Sequence
  Chemically synthesized
ucgccagaaccuaauuauucuuu

SEQ ID NO: 77872 - RNA, 23 nt, Artificial Sequence
  Chemically synthesized
aucaacaggccgucacaggaauu

SEQ ID NO: 77873 - RNA, 23 nt, Artificial Sequence
  Chemically synthesized
ucaacaggccgucacaggaauuc

SEQ ID NO: 77874 - RNA, 23 nt, Artificial Sequence
  Chemically synthesized
cuucccuaguaaauuauuuuguc

SEQ ID NO: 77875 - RNA, 23 nt, Artificial Sequence
  Chemically synthesized
uuguuccaguugggccucccaua

SEQ ID NO: 77876 - RNA, 23 nt, Artificial Sequence
  Chemically synthesized
ugagaaagaagacgaugaaaaca

SEQ ID NO: 77877 - RNA, 23 nt, Artificial Sequence
  Chemically synthesized
agaagcucuccuuguuguaauag

SEQ ID NO: 77878 - RNA, 23 nt, Artificial Sequence
  Chemically synthesized
uugggccucccauagaaggucuu

SEQ ID NO: 77879 - RNA, 23 nt, Artificial Sequence
  Chemically synthesized
auguacugcccuggcgccauuuu

SEQ ID NO: 77880 - RNA, 23 nt, Artificial Sequence
  Chemically synthesized
acagauaaaaauuuauucccagc

SEQ ID NO: 77881 - RNA, 23 nt, Artificial Sequence
  Chemically synthesized
accaccuugguaaugacaacuuc

SEQ ID NO: 77882 - RNA, 23 nt, Artificial Sequence
  Chemically synthesized
uggagagacccucauucaaaauc

SEQ ID NO: 77883 - RNA, 23 nt, Artificial Sequence
  Chemically synthesized
uccguguuuccagggagaguaag

SEQ ID NO: 77884 - RNA, 23 nt, Artificial Sequence
  Chemically synthesized
acugcccuggcgccauuuuaaag

SEQ ID NO: 77885 - RNA, 23 nt, Artificial Sequence
  Chemically synthesized
gccagaaccuaauuauucuuuca

SEQ ID NO: 77886 - RNA, 23 nt, Artificial Sequence
  Chemically synthesized
ucccagccaugagaguacuaaua

SEQ ID NO: 77887 - RNA, 23 nt, Artificial Sequence
  Chemically synthesized
uaagggcuucccuaguaaauuau

SEQ ID NO: 77888 - RNA, 23 nt, Artificial Sequence
  Chemically synthesized
ccagccaugagaguacuaauaug

SEQ ID NO: 77889 - RNA, 23 nt, Artificial Sequence
  Chemically synthesized
cagaaccuaauuauucuuucaca

SEQ ID NO: 77890 - RNA, 23 nt, Artificial Sequence
  Chemically synthesized
ccuaauuauucuuucacaugcau

SEQ ID NO: 77891 - RNA, 23 nt, Artificial Sequence
  Chemically synthesized
aggccugucugaugaacucaguu

SEQ ID NO: 77892 - RNA, 23 nt, Artificial Sequence
  Chemically synthesized
ugguggaguucuuuggaaucaau

SEQ ID NO: 77893 - RNA, 23 nt, Artificial Sequence
  Chemically synthesized
ugguggagagacccucauucaaa

SEQ ID NO: 77894 - RNA, 23 nt, Artificial Sequence
  Chemically synthesized
acaagaccacagggccuaaaauc

SEQ ID NO: 77895 - RNA, 23 nt, Artificial Sequence
  Chemically synthesized
aacaggccgucacaggaauuccu

SEQ ID NO: 77896 - RNA, 23 nt, Artificial Sequence
  Chemically synthesized
uccucuuaugaaugaaauaaggu

SEQ ID NO: 77897 - RNA, 23 nt, Artificial Sequence
  Chemically synthesized
ccgguaagaaauauaugauaacu

SEQ ID NO: 77898 - RNA, 23 nt, Artificial Sequence
  Chemically synthesized
auugggccacugucugccauucu

SEQ ID NO: 77899 - RNA, 23 nt, Artificial Sequence
  Chemically synthesized
agugguagcguuccagguugaag

SEQ ID NO: 77900 - RNA, 23 nt, Artificial Sequence
  Chemically synthesized
gaaccuaauuauucuuucacaug

SEQ ID NO: 77901 - RNA, 23 nt, Artificial Sequence
  Chemically synthesized
aagccaguguugaacccaaaaua

SEQ ID NO: 77902 - RNA, 23 nt, Artificial Sequence
  Chemically synthesized
agccaguguugaacccaaaauaa

SEQ ID NO: 77903 - RNA, 23 nt, Artificial Sequence
  Chemically synthesized
uacugcccuggcgccauuuuaaa

SEQ ID NO: 77904 - RNA, 23 nt, Artificial Sequence
  Chemically synthesized
caguaaauguuuuuguucuguug

SEQ ID NO: 77905 - RNA, 23 nt, Artificial Sequence
  Chemically synthesized
ccagaaccuaauuauucuuucac

SEQ ID NO: 77906 - RNA, 23 nt, Artificial Sequence
  Chemically synthesized
agggcuucccuaguaaauuauuu

SEQ ID NO: 77907 - RNA, 23 nt, Artificial Sequence
  Chemically synthesized
uccacgguccucugcagcaaaua

SEQ ID NO: 77908 - RNA, 23 nt, Artificial Sequence
  Chemically synthesized
guaagggcuucccuaguaaauua

SEQ ID NO: 77909 - RNA, 23 nt, Artificial Sequence
  Chemically synthesized
gggagaguaagagaucagcaaac

SEQ ID NO: 77910 - RNA, 23 nt, Artificial Sequence
  Chemically synthesized
augguggagagacccucauucaa

SEQ ID NO: 77911 - RNA, 23 nt, Artificial Sequence
  Chemically synthesized
aguaagggcuucccuaguaaauu

SEQ ID NO: 77912 - RNA, 23 nt, Artificial Sequence
  Chemically synthesized
ucccaacugggagcucauaucaa

SEQ ID NO: 77913 - RNA, 23 nt, Artificial Sequence
  Chemically synthesized
aggaauuccugguggaguucuuu

SEQ ID NO: 77914 - RNA, 23 nt, Artificial Sequence
  Chemically synthesized
aaagcucuugcaucccggcaaau

SEQ ID NO: 77915 - RNA, 23 nt, Artificial Sequence
  Chemically synthesized
gcauuuguaccauauagauuuca

SEQ ID NO: 77916 - RNA, 23 nt, Artificial Sequence
  Chemically synthesized
acacacacacuggguagugaaau

SEQ ID NO: 77917 - RNA, 23 nt, Artificial Sequence
  Chemically synthesized
aagggcuucccuaguaaauuauu

SEQ ID NO: 77918 - RNA, 23 nt, Artificial Sequence
  Chemically synthesized
auggccaggcugagaaagaagac

SEQ ID NO: 77919 - RNA, 23 nt, Artificial Sequence
  Chemically synthesized
uaccaccuugguaaugacaacuu

SEQ ID NO: 77920 - RNA, 23 nt, Artificial Sequence
  Chemically synthesized
gccaguguugaacccaaaauaac

SEQ ID NO: 77921 - RNA, 23 nt, Artificial Sequence
  Chemically synthesized
gcuucccuaguaaauuauuuugu

SEQ ID NO: 77922 - RNA, 23 nt, Artificial Sequence
  Chemically synthesized
gacauguuauuuauaagcuaagg

SEQ ID NO: 77923 - RNA, 23 nt, Artificial Sequence
  Chemically synthesized
caggguugagguagcucucguua

SEQ ID NO: 77924 - RNA, 23 nt, Artificial Sequence
  Chemically synthesized
aaugcgccacgauguggaugguu

SEQ ID NO: 77925 - RNA, 23 nt, Artificial Sequence
  Chemically synthesized
gaguucuuuggaaucaauaacuu

SEQ ID NO: 77926 - RNA, 23 nt, Artificial Sequence
  Chemically synthesized
guacugcccuggcgccauuuuaa

SEQ ID NO: 77927 - RNA, 23 nt, Artificial Sequence
  Chemically synthesized
ucccggcaaauccaguagaaaua

SEQ ID NO: 77928 - RNA, 23 nt, Artificial Sequence
  Chemically synthesized
guugcucuucggcugucaggaaa

SEQ ID NO: 77929 - RNA, 23 nt, Artificial Sequence
  Chemically synthesized
guuccucuuaugaaugaaauaag

SEQ ID NO: 77930 - RNA, 23 nt, Artificial Sequence
  Chemically synthesized
gagagcuuuagguccacagaaga

SEQ ID NO: 77931 - RNA, 23 nt, Artificial Sequence
  Chemically synthesized
auccguguuuccagggagaguaa

SEQ ID NO: 77932 - RNA, 23 nt, Artificial Sequence
  Chemically synthesized
auggauggccaggcugagaaaga

SEQ ID NO: 77933 - RNA, 23 nt, Artificial Sequence
  Chemically synthesized
aggcgaccaguuugugaaaucug

SEQ ID NO: 77934 - RNA, 23 nt, Artificial Sequence
  Chemically synthesized
ccacgauguggaugguugcauua

SEQ ID NO: 77935 - RNA, 23 nt, Artificial Sequence
  Chemically synthesized
ucccucaccugugucuggauguu

SEQ ID NO: 77936 - RNA, 23 nt, Artificial Sequence
  Chemically synthesized
cacaggaauuccugguggaguuc

SEQ ID NO: 77937 - RNA, 23 nt, Artificial Sequence
  Chemically synthesized
gguggaguucuuuggaaucaaua

SEQ ID NO: 77938 - RNA, 23 nt, Artificial Sequence
  Chemically synthesized
cccggcaaauccaguagaaauac

SEQ ID NO: 77939 - RNA, 23 nt, Artificial Sequence
  Chemically synthesized
gguggcuuaccaccuugguaaug

SEQ ID NO: 77940 - RNA, 23 nt, Artificial Sequence
  Chemically synthesized
ccggcaaauccaguagaaauaca

SEQ ID NO: 77941 - RNA, 23 nt, Artificial Sequence
  Chemically synthesized
gaaaaucaggcucuucacauagc

SEQ ID NO: 77942 - RNA, 23 nt, Artificial Sequence
  Chemically synthesized
ugaaaaucaggcucuucacauag

SEQ ID NO: 77943 - RNA, 23 nt, Artificial Sequence
  Chemically synthesized
augaaaaucaggcucuucacaua

SEQ ID NO: 77944 - RNA, 23 nt, Artificial Sequence
  Chemically synthesized
cguggaggaggcaauuagacaaa

SEQ ID NO: 77945 - RNA, 23 nt, Artificial Sequence
  Chemically synthesized
ccguggaggaggcaauuagacaa

SEQ ID NO: 77946 - RNA, 23 nt, Artificial Sequence
  Chemically synthesized
gggaacuggugaauaauaauuaa

SEQ ID NO: 77947 - RNA, 23 nt, Artificial Sequence
  Chemically synthesized
ugggaacuggugaauaauaauua

SEQ ID NO: 77948 - RNA, 23 nt, Artificial Sequence
  Chemically synthesized
uugggaacuggugaauaauaauu

SEQ ID NO: 77949 - RNA, 23 nt, Artificial Sequence
  Chemically synthesized
guugggaacuggugaauaauaau

SEQ ID NO: 77950 - RNA, 23 nt, Artificial Sequence
  Chemically synthesized
aguugggaacuggugaauaauaa

SEQ ID NO: 77951 - RNA, 23 nt, Artificial Sequence
  Chemically synthesized
gaugaaaaucaggcucuucacau

SEQ ID NO: 77952 - RNA, 23 nt, Artificial Sequence
  Chemically synthesized
ggaacuggugaauaauaauuaac

SEQ ID NO: 77953 - RNA, 23 nt, Artificial Sequence
  Chemically synthesized
gcuuuacacugggacgaaaauac

SEQ ID NO: 77954 - RNA, 23 nt, Artificial Sequence
  Chemically synthesized
cgaaaauacugacgugauuacag

SEQ ID NO: 77955 - RNA, 23 nt, Artificial Sequence
  Chemically synthesized
guucuucuguggaccuaaagcuc

SEQ ID NO: 77956 - RNA, 23 nt, Artificial Sequence
  Chemically synthesized
uguucuucuguggaccuaaagcu

SEQ ID NO: 77957 - RNA, 23 nt, Artificial Sequence
  Chemically synthesized
guaugcaugugaaagaauaauua

SEQ ID NO: 77958 - RNA, 23 nt, Artificial Sequence
  Chemically synthesized
uguaugcaugugaaagaauaauu

SEQ ID NO: 77959 - RNA, 23 nt, Artificial Sequence
  Chemically synthesized
acgacccaacauccagacacagg

SEQ ID NO: 77960 - RNA, 23 nt, Artificial Sequence
  Chemically synthesized
aacgacccaacauccagacacag

SEQ ID NO: 77961 - RNA, 23 nt, Artificial Sequence
  Chemically synthesized
uaacgacccaacauccagacaca

SEQ ID NO: 77962 - RNA, 23 nt, Artificial Sequence
  Chemically synthesized
auuagguucuggcgauuucaaca

SEQ ID NO: 77963 - RNA, 23 nt, Artificial Sequence
  Chemically synthesized
caaagaacuccaccaggaauucc

SEQ ID NO: 77964 - RNA, 23 nt, Artificial Sequence
  Chemically synthesized
ccaaagaacuccaccaggaauuc

SEQ ID NO: 77965 - RNA, 23 nt, Artificial Sequence
  Chemically synthesized
uccaaagaacuccaccaggaauu

SEQ ID NO: 77966 - RNA, 23 nt, Artificial Sequence
  Chemically synthesized
uuccaaagaacuccaccaggaau

SEQ ID NO: 77967 - RNA, 23 nt, Artificial Sequence
  Chemically synthesized
auuccaaagaacuccaccaggaa

SEQ ID NO: 77968 - RNA, 23 nt, Artificial Sequence
  Chemically synthesized
gguguucauuucuauuacaacaa

SEQ ID NO: 77969 - RNA, 23 nt, Artificial Sequence
  Chemically synthesized
gcuuuagucuugaucaugaccuc

SEQ ID NO: 77970 - RNA, 23 nt, Artificial Sequence
  Chemically synthesized
cuuuacacugggacgaaaauacu

SEQ ID NO: 77971 - RNA, 23 nt, Artificial Sequence
  Chemically synthesized
aagaaguugucauuaccaaggug

SEQ ID NO: 77972 - RNA, 23 nt, Artificial Sequence
  Chemically synthesized
gugaacaguacacuauaccauac

SEQ ID NO: 77973 - RNA, 23 nt, Artificial Sequence
  Chemically synthesized
cauacuuccuuagcuuauaaaua

SEQ ID NO: 77974 - RNA, 23 nt, Artificial Sequence
  Chemically synthesized
aggugagggagaagaaauuuccu

SEQ ID NO: 77975 - RNA, 23 nt, Artificial Sequence
  Chemically synthesized
ccuuacuaacgacccaacaucca

SEQ ID NO: 77976 - RNA, 23 nt, Artificial Sequence
  Chemically synthesized
gauuugccgggaugcaagagcuu

SEQ ID NO: 77977 - RNA, 23 nt, Artificial Sequence
  Chemically synthesized
ggauuugccgggaugcaagagcu

SEQ ID NO: 77978 - RNA, 23 nt, Artificial Sequence
  Chemically synthesized
uggauuugccgggaugcaagagc

SEQ ID NO: 77979 - RNA, 23 nt, Artificial Sequence
  Chemically synthesized
cuggauuugccgggaugcaagag

SEQ ID NO: 77980 - RNA, 23 nt, Artificial Sequence
  Chemically synthesized
acuggauuugccgggaugcaaga

SEQ ID NO: 77981 - RNA, 23 nt, Artificial Sequence
  Chemically synthesized
aguuauuuuggguucaacacugg

SEQ ID NO: 77982 - RNA, 23 nt, Artificial Sequence
  Chemically synthesized
uguucgaggccaaacccaagaca

SEQ ID NO: 77983 - RNA, 23 nt, Artificial Sequence
  Chemically synthesized
uuguucgaggccaaacccaagac

SEQ ID NO: 77984 - RNA, 23 nt, Artificial Sequence
  Chemically synthesized
auuguucgaggccaaacccaaga

SEQ ID NO: 77985 - RNA, 23 nt, Artificial Sequence
  Chemically synthesized
gauuguucgaggccaaacccaag

SEQ ID NO: 77986 - RNA, 23 nt, Artificial Sequence
  Chemically synthesized
ccuaugaguuguucugguacaca

SEQ ID NO: 77987 - RNA, 23 nt, Artificial Sequence
  Chemically synthesized
uccagacacaggugagggagaag

SEQ ID NO: 77988 - RNA, 23 nt, Artificial Sequence
  Chemically synthesized
auccagacacaggugagggagaa

SEQ ID NO: 77989 - RNA, 23 nt, Artificial Sequence
  Chemically synthesized
aaaaagcguggcuuuaaaauggc

SEQ ID NO: 77990 - RNA, 23 nt, Artificial Sequence
  Chemically synthesized
ucuguagagaccgcuaugcagaa

SEQ ID NO: 77991 - RNA, 23 nt, Artificial Sequence
  Chemically synthesized
aguuguucugguacacacaccau

SEQ ID NO: 77992 - RNA, 23 nt, Artificial Sequence
  Chemically synthesized
cuuuggaacugcccugacagaug

SEQ ID NO: 77993 - RNA, 23 nt, Artificial Sequence
  Chemically synthesized
ccuuuggaacugcccugacagau

SEQ ID NO: 77994 - RNA, 23 nt, Artificial Sequence
  Chemically synthesized
cccuuuggaacugcccugacaga

SEQ ID NO: 77995 - RNA, 23 nt, Artificial Sequence
  Chemically synthesized
gcccuuuggaacugcccugacag

SEQ ID NO: 77996 - RNA, 23 nt, Artificial Sequence
  Chemically synthesized
ggcccuuuggaacugcccugaca

SEQ ID NO: 77997 - RNA, 23 nt, Artificial Sequence
  Chemically synthesized
aaauuuccugacagccgaagagc

SEQ ID NO: 77998 - RNA, 23 nt, Artificial Sequence
  Chemically synthesized
acuggucgccuaugggauagcug

SEQ ID NO: 77999 - RNA, 23 nt, Artificial Sequence
  Chemically synthesized
aacuggucgccuaugggauagcu

SEQ ID NO: 78000 - RNA, 23 nt, Artificial Sequence
  Chemically synthesized
aaacuggucgccuaugggauagc

SEQ ID NO: 78001 - RNA, 23 nt, Artificial Sequence
  Chemically synthesized
caaacuggucgccuaugggauag

SEQ ID NO: 78002 - RNA, 23 nt, Artificial Sequence
  Chemically synthesized
acaaacuggucgccuaugggaua

SEQ ID NO: 78003 - RNA, 23 nt, Artificial Sequence
  Chemically synthesized
ccugugacggccuguugauauga

SEQ ID NO: 78004 - RNA, 23 nt, Artificial Sequence
  Chemically synthesized
uccugugacggccuguugauaug

SEQ ID NO: 78005 - RNA, 23 nt, Artificial Sequence
  Chemically synthesized
uuccugugacggccuguugauau

SEQ ID NO: 78006 - RNA, 23 nt, Artificial Sequence
  Chemically synthesized
auuccugugacggccuguugaua

SEQ ID NO: 78007 - RNA, 23 nt, Artificial Sequence
  Chemically synthesized
aauuagguucuggcgauuucaac

SEQ ID NO: 78008 - RNA, 23 nt, Artificial Sequence
  Chemically synthesized
uaauuagguucuggcgauuucaa

SEQ ID NO: 78009 - RNA, 23 nt, Artificial Sequence
  Chemically synthesized
caaacacaaccacugaauugcua

SEQ ID NO: 78010 - RNA, 23 nt, Artificial Sequence
  Chemically synthesized
ccauuacacacgaguuauuuugg

SEQ ID NO: 78011 - RNA, 23 nt, Artificial Sequence
  Chemically synthesized
caaggagagcuucuagacuuugg

SEQ ID NO: 78012 - RNA, 23 nt, Artificial Sequence
  Chemically synthesized
acaaggagagcuucuagacuuug

SEQ ID NO: 78013 - RNA, 23 nt, Artificial Sequence
  Chemically synthesized
aacaaggagagcuucuagacuuu

SEQ ID NO: 78014 - RNA, 23 nt, Artificial Sequence
  Chemically synthesized
gcacaacaucaccuucuguagag

SEQ ID NO: 78015 - RNA, 23 nt, Artificial Sequence
  Chemically synthesized
uuuuaacugcaugcuaauucuaa

SEQ ID NO: 78016 - RNA, 23 nt, Artificial Sequence
  Chemically synthesized
gauuccaaagaacuccaccagga

SEQ ID NO: 78017 - RNA, 23 nt, Artificial Sequence
  Chemically synthesized
uucuauuacaacaaggagagcuu

SEQ ID NO: 78018 - RNA, 23 nt, Artificial Sequence
  Chemically synthesized
uuucuauuacaacaaggagagcu

SEQ ID NO: 78019 - RNA, 23 nt, Artificial Sequence
  Chemically synthesized
auuucuauuacaacaaggagagc

SEQ ID NO: 78020 - RNA, 23 nt, Artificial Sequence
  Chemically synthesized
cauuucuauuacaacaaggagag

SEQ ID NO: 78021 - RNA, 23 nt, Artificial Sequence
  Chemically synthesized
ucauuucuauuacaacaaggaga

SEQ ID NO: 78022 - RNA, 23 nt, Artificial Sequence
  Chemically synthesized
uucuguagagaccgcuaugcaga

SEQ ID NO: 78023 - RNA, 23 nt, Artificial Sequence
  Chemically synthesized
gaaaucuauaugguacaaaugca

SEQ ID NO: 78024 - RNA, 23 nt, Artificial Sequence
  Chemically synthesized
caaaaaccucagauuucacaaac

SEQ ID NO: 78025 - RNA, 23 nt, Artificial Sequence
  Chemically synthesized
gaaaauacugacgugauuacagg

SEQ ID NO: 78026 - RNA, 23 nt, Artificial Sequence
  Chemically synthesized
caauuuucuggcaaggaacccuc

SEQ ID NO: 78027 - RNA, 23 nt, Artificial Sequence
  Chemically synthesized
gaucaugaccucgucaacugagu

SEQ ID NO: 78028 - RNA, 23 nt, Artificial Sequence
  Chemically synthesized
ugaucaugaccucgucaacugag

SEQ ID NO: 78029 - RNA, 23 nt, Artificial Sequence
  Chemically synthesized
uucauuucuauuacaacaaggag

SEQ ID NO: 78030 - RNA, 23 nt, Artificial Sequence
  Chemically synthesized
guucauuucuauuacaacaagga

SEQ ID NO: 78031 - RNA, 23 nt, Artificial Sequence
  Chemically synthesized
uguucauuucuauuacaacaagg

SEQ ID NO: 78032 - RNA, 23 nt, Artificial Sequence
  Chemically synthesized
ccauauuaguacucucauggcug

SEQ ID NO: 78033 - RNA, 23 nt, Artificial Sequence
  Chemically synthesized
ucuuaccggcugggaugaaaauc

SEQ ID NO: 78034 - RNA, 23 nt, Artificial Sequence
  Chemically synthesized
uucuuaccggcugggaugaaaau

SEQ ID NO: 78035 - RNA, 23 nt, Artificial Sequence
  Chemically synthesized
uuucuuaccggcugggaugaaaa

SEQ ID NO: 78036 - RNA, 23 nt, Artificial Sequence
  Chemically synthesized
auuucuuaccggcugggaugaaa

SEQ ID NO: 78037 - RNA, 23 nt, Artificial Sequence
  Chemically synthesized
ucucucucugcacaacaucaccu

SEQ ID NO: 78038 - RNA, 23 nt, Artificial Sequence
  Chemically synthesized
gaguucaagcagauugccuacaa

SEQ ID NO: 78039 - RNA, 23 nt, Artificial Sequence
  Chemically synthesized
ugaguucaagcagauugccuaca

SEQ ID NO: 78040 - RNA, 23 nt, Artificial Sequence
  Chemically synthesized
augaguucaagcagauugccuac

SEQ ID NO: 78041 - RNA, 23 nt, Artificial Sequence
  Chemically synthesized
aaugaguucaagcagauugccua

SEQ ID NO: 78042 - RNA, 23 nt, Artificial Sequence
  Chemically synthesized
cagugcccagccauaucuucgcu

SEQ ID NO: 78043 - RNA, 23 nt, Artificial Sequence
  Chemically synthesized
gcagugcccagccauaucuucgc

SEQ ID NO: 78044 - RNA, 23 nt, Artificial Sequence
  Chemically synthesized
ugcagugcccagccauaucuucg

SEQ ID NO: 78045 - RNA, 23 nt, Artificial Sequence
  Chemically synthesized
gugcagugcccagccauaucuuc

SEQ ID NO: 78046 - RNA, 23 nt, Artificial Sequence
  Chemically synthesized
ggugcagugcccagccauaucuu

SEQ ID NO: 78047 - RNA, 23 nt, Artificial Sequence
  Chemically synthesized
agaaguugucauuaccaaggugg

SEQ ID NO: 78048 - RNA, 23 nt, Artificial Sequence
  Chemically synthesized
caacaaggagagcuucuagacuu

SEQ ID NO: 78049 - RNA, 23 nt, Artificial Sequence
  Chemically synthesized
cauauauuucuuaccggcuggga

SEQ ID NO: 78050 - RNA, 23 nt, Artificial Sequence
  Chemically synthesized
ucauauauuucuuaccggcuggg

SEQ ID NO: 78051 - RNA, 23 nt, Artificial Sequence
  Chemically synthesized
aucauauauuucuuaccggcugg

SEQ ID NO: 78052 - RNA, 23 nt, Artificial Sequence
  Chemically synthesized
uaucauauauuucuuaccggcug

SEQ ID NO: 78053 - RNA, 23 nt, Artificial Sequence
  Chemically synthesized
uuaucauauauuucuuaccggcu

SEQ ID NO: 78054 - RNA, 23 nt, Artificial Sequence
  Chemically synthesized
acacugggacgaaaauacugacg

SEQ ID NO: 78055 - RNA, 23 nt, Artificial Sequence
  Chemically synthesized
uacacugggacgaaaauacugac

SEQ ID NO: 78056 - RNA, 23 nt, Artificial Sequence
  Chemically synthesized
uuacacugggacgaaaauacuga

SEQ ID NO: 78057 - RNA, 23 nt, Artificial Sequence
  Chemically synthesized
uacuggauuugccgggaugcaag

SEQ ID NO: 78058 - RNA, 23 nt, Artificial Sequence
  Chemically synthesized
ggugagggagaagaaauuuccug

SEQ ID NO: 78059 - RNA, 23 nt, Artificial Sequence
  Chemically synthesized
guuaaugcaaccauccacaucgu

SEQ ID NO: 78060 - RNA, 23 nt, Artificial Sequence
  Chemically synthesized
uguuaaugcaaccauccacaucg

SEQ ID NO: 78061 - RNA, 23 nt, Artificial Sequence
  Chemically synthesized
cuguuaaugcaaccauccacauc

SEQ ID NO: 78062 - RNA, 23 nt, Artificial Sequence
  Chemically synthesized
gcuguuaaugcaaccauccacau

SEQ ID NO: 78063 - RNA, 23 nt, Artificial Sequence
  Chemically synthesized
cuuacuaacgacccaacauccag

SEQ ID NO: 78064 - RNA, 23 nt, Artificial Sequence
  Chemically synthesized
cagcagcaguauuggcguguucu

SEQ ID NO: 78065 - RNA, 23 nt, Artificial Sequence
  Chemically synthesized
ccagcagcaguauuggcguguuc

SEQ ID NO: 78066 - RNA, 23 nt, Artificial Sequence
  Chemically synthesized
cccagcagcaguauuggcguguu

SEQ ID NO: 78067 - RNA, 23 nt, Artificial Sequence
  Chemically synthesized
auuuacuagggaagcccuuacua

SEQ ID NO: 78068 - RNA, 23 nt, Artificial Sequence
  Chemically synthesized
uggaggucaaguccaggcauugu

SEQ ID NO: 78069 - RNA, 23 nt, Artificial Sequence
  Chemically synthesized
uuggaggucaaguccaggcauug

SEQ ID NO: 78070 - RNA, 23 nt, Artificial Sequence
  Chemically synthesized
uuuggaggucaaguccaggcauu

SEQ ID NO: 78071 - RNA, 23 nt, Artificial Sequence
  Chemically synthesized
ugcccagccauaucuucgcugga

SEQ ID NO: 78072 - RNA, 23 nt, Artificial Sequence
  Chemically synthesized
caucagacaggccuccuaugagu

SEQ ID NO: 78073 - RNA, 23 nt, Artificial Sequence
  Chemically synthesized
aaguauuugcugcagaggaccgu

SEQ ID NO: 78074 - RNA, 23 nt, Artificial Sequence
  Chemically synthesized
caaguauuugcugcagaggaccg

SEQ ID NO: 78075 - RNA, 23 nt, Artificial Sequence
  Chemically synthesized
uuuacacugggacgaaaauacug

SEQ ID NO: 78076 - RNA, 23 nt, Artificial Sequence
  Chemically synthesized
uggaaacacggaugagugagcag

SEQ ID NO: 78077 - RNA, 23 nt, Artificial Sequence
  Chemically synthesized
cuggaaacacggaugagugagca

SEQ ID NO: 78078 - RNA, 23 nt, Artificial Sequence
  Chemically synthesized
guguauuucuacuggauuugccg

SEQ ID NO: 78079 - RNA, 23 nt, Artificial Sequence
  Chemically synthesized
aagcucucucgaggacacuucaa

SEQ ID NO: 78080 - RNA, 23 nt, Artificial Sequence
  Chemically synthesized
aaagcucucucgaggacacuuca

SEQ ID NO: 78081 - RNA, 23 nt, Artificial Sequence
  Chemically synthesized
uuggcguguucuucuguggaccu

SEQ ID NO: 78082 - RNA, 23 nt, Artificial Sequence
  Chemically synthesized
auuggcguguucuucuguggacc

SEQ ID NO: 78083 - RNA, 23 nt, Artificial Sequence
  Chemically synthesized
uauuggcguguucuucuguggac

SEQ ID NO: 78084 - RNA, 23 nt, Artificial Sequence
  Chemically synthesized
uggaacugcccugacagauguau

SEQ ID NO: 78085 - RNA, 23 nt, Artificial Sequence
  Chemically synthesized
uuggaacugcccugacagaugua

SEQ ID NO: 78086 - RNA, 23 nt, Artificial Sequence
  Chemically synthesized
uuuggaacugcccugacagaugu

SEQ ID NO: 78087 - RNA, 23 nt, Artificial Sequence
  Chemically synthesized
gagcuucuagacuuuggagguca

SEQ ID NO: 78088 - RNA, 23 nt, Artificial Sequence
  Chemically synthesized
cacaaacuggucgccuaugggau

SEQ ID NO: 78089 - RNA, 23 nt, Artificial Sequence
  Chemically synthesized
ucgaggccaaacccaagacaguc

SEQ ID NO: 78090 - RNA, 23 nt, Artificial Sequence
  Chemically synthesized
uucgaggccaaacccaagacagu

SEQ ID NO: 78091 - RNA, 23 nt, Artificial Sequence
  Chemically synthesized
guugauaugagcucccaguuggg

SEQ ID NO: 78092 - RNA, 23 nt, Artificial Sequence
  Chemically synthesized
uguugauaugagcucccaguugg

SEQ ID NO: 78093 - RNA, 23 nt, Artificial Sequence
  Chemically synthesized
ccaccaggaauuccugugacggc

SEQ ID NO: 78094 - RNA, 23 nt, Artificial Sequence
  Chemically synthesized
uccaccaggaauuccugugacgg

SEQ ID NO: 78095 - RNA, 23 nt, Artificial Sequence
  Chemically synthesized
acuccaccaggaauuccugugac

SEQ ID NO: 78096 - RNA, 23 nt, Artificial Sequence
  Chemically synthesized
aacuccaccaggaauuccuguga

SEQ ID NO: 78097 - RNA, 23 nt, Artificial Sequence
  Chemically synthesized
aaauacugacgugauuacaggcu

SEQ ID NO: 78098 - RNA, 23 nt, Artificial Sequence
  Chemically synthesized
aaaauacugacgugauuacaggc

SEQ ID NO: 78099 - RNA, 23 nt, Artificial Sequence
  Chemically synthesized
ucuauuacaacaaggagagcuuc

SEQ ID NO: 78100 - RNA, 23 nt, Artificial Sequence
  Chemically synthesized
ugguacaaaugcagugaggcaca

SEQ ID NO: 78101 - RNA, 23 nt, Artificial Sequence
  Chemically synthesized
augguacaaaugcagugaggcac

SEQ ID NO: 78102 - RNA, 23 nt, Artificial Sequence
  Chemically synthesized
uaugguacaaaugcagugaggca

SEQ ID NO: 78103 - RNA, 23 nt, Artificial Sequence
  Chemically synthesized
aguauuugcugcagaggaccgug

SEQ ID NO: 78104 - RNA, 23 nt, Artificial Sequence
  Chemically synthesized
auuuuaacugcaugcuaauucua

SEQ ID NO: 78105 - RNA, 23 nt, Artificial Sequence
  Chemically synthesized
acuuuuucagcgugcacauccgg

SEQ ID NO: 78106 - RNA, 23 nt, Artificial Sequence
  Chemically synthesized
cagacaggccuccuaugaguugu

SEQ ID NO: 78107 - RNA, 23 nt, Artificial Sequence
  Chemically synthesized
ucagacaggccuccuaugaguug

SEQ ID NO: 78108 - RNA, 23 nt, Artificial Sequence
  Chemically synthesized
aucagacaggccuccuaugaguu

SEQ ID NO: 78109 - RNA, 23 nt, Artificial Sequence
  Chemically synthesized
uaaggacaauagcaggcgucacc

SEQ ID NO: 78110 - RNA, 23 nt, Artificial Sequence
  Chemically synthesized
cuaaggacaauagcaggcgucac

SEQ ID NO: 78111 - RNA, 23 nt, Artificial Sequence
  Chemically synthesized
gcuaaggacaauagcaggcguca

SEQ ID NO: 78112 - RNA, 23 nt, Artificial Sequence
  Chemically synthesized
ugcuaaggacaauagcaggcguc

SEQ ID NO: 78113 - RNA, 23 nt, Artificial Sequence
  Chemically synthesized
uugcuaaggacaauagcaggcgu

SEQ ID NO: 78114 - RNA, 23 nt, Artificial Sequence
  Chemically synthesized
uauuucuuaccggcugggaugaa

SEQ ID NO: 78115 - RNA, 23 nt, Artificial Sequence
  Chemically synthesized
cuaacgacccaacauccagacac

SEQ ID NO: 78116 - RNA, 23 nt, Artificial Sequence
  Chemically synthesized
acuaacgacccaacauccagaca

SEQ ID NO: 78117 - RNA, 23 nt, Artificial Sequence
  Chemically synthesized
uacuaacgacccaacauccagac

SEQ ID NO: 78118 - RNA, 23 nt, Artificial Sequence
  Chemically synthesized
uuacuaacgacccaacauccaga

SEQ ID NO: 78119 - RNA, 23 nt, Artificial Sequence
  Chemically synthesized
cauuacacacgaguuauuuuggg

SEQ ID NO: 78120 - RNA, 23 nt, Artificial Sequence
  Chemically synthesized
cuuuggaggucaaguccaggcau

SEQ ID NO: 78121 - RNA, 23 nt, Artificial Sequence
  Chemically synthesized
acuuuggaggucaaguccaggca

SEQ ID NO: 78122 - RNA, 23 nt, Artificial Sequence
  Chemically synthesized
gacuuuggaggucaaguccaggc

SEQ ID NO: 78123 - RNA, 23 nt, Artificial Sequence
  Chemically synthesized
auauuucuuaccggcugggauga

SEQ ID NO: 78124 - RNA, 23 nt, Artificial Sequence
  Chemically synthesized
uauauuucuuaccggcugggaug

SEQ ID NO: 78125 - RNA, 23 nt, Artificial Sequence
  Chemically synthesized
auauauuucuuaccggcugggau

SEQ ID NO: 78126 - RNA, 23 nt, Artificial Sequence
  Chemically synthesized
guuaucauauauuucuuaccggc

SEQ ID NO: 78127 - RNA, 23 nt, Artificial Sequence
  Chemically synthesized
auuuccugacagccgaagagcaa

SEQ ID NO: 78128 - RNA, 23 nt, Artificial Sequence
  Chemically synthesized
aauuuccugacagccgaagagca

SEQ ID NO: 78129 - RNA, 23 nt, Artificial Sequence
  Chemically synthesized
cuggucgccuaugggauagcugu

SEQ ID NO: 78130 - RNA, 23 nt, Artificial Sequence
  Chemically synthesized
aaaugcagugaggcacagacccc

SEQ ID NO: 78131 - RNA, 23 nt, Artificial Sequence
  Chemically synthesized
aguacaucuuggugcagugccca

SEQ ID NO: 78132 - RNA, 23 nt, Artificial Sequence
  Chemically synthesized
uuguucugguacacacaccaugu

SEQ ID NO: 78133 - RNA, 23 nt, Artificial Sequence
  Chemically synthesized
guuguucugguacacacaccaug

SEQ ID NO: 78134 - RNA, 23 nt, Artificial Sequence
  Chemically synthesized
uaauucuaauaccugucagucga

SEQ ID NO: 78135 - RNA, 23 nt, Artificial Sequence
  Chemically synthesized
auuaacuauugugaacaguacac

SEQ ID NO: 78136 - RNA, 23 nt, Artificial Sequence
  Chemically synthesized
aauuaacuauugugaacaguaca

SEQ ID NO: 78137 - RNA, 23 nt, Artificial Sequence
  Chemically synthesized
uaugcagaauggcagacaguggc

SEQ ID NO: 78138 - RNA, 23 nt, Artificial Sequence
  Chemically synthesized
augagcucccaguugggaacugg

SEQ ID NO: 78139 - RNA, 23 nt, Artificial Sequence
  Chemically synthesized
uaugagcucccaguugggaacug

SEQ ID NO: 78140 - RNA, 23 nt, Artificial Sequence
  Chemically synthesized
auaugagcucccaguugggaacu

SEQ ID NO: 78141 - RNA, 23 nt, Artificial Sequence
  Chemically synthesized
gauaugagcucccaguugggaac

SEQ ID NO: 78142 - RNA, 23 nt, Artificial Sequence
  Chemically synthesized
ugauaugagcucccaguugggaa

SEQ ID NO: 78143 - RNA, 23 nt, Artificial Sequence
  Chemically synthesized
gcuaugugaagagccugauuuuc

SEQ ID NO: 78144 - RNA, 23 nt, Artificial Sequence
  Chemically synthesized
cuaugugaagagccugauuuuca

SEQ ID NO: 78145 - RNA, 23 nt, Artificial Sequence
  Chemically synthesized
uaugugaagagccugauuuucau

SEQ ID NO: 78146 - RNA, 23 nt, Artificial Sequence
  Chemically synthesized
uuugucuaauugccuccuccacg

SEQ ID NO: 78147 - RNA, 23 nt, Artificial Sequence
  Chemically synthesized
uugucuaauugccuccuccacgg

SEQ ID NO: 78148 - RNA, 23 nt, Artificial Sequence
  Chemically synthesized
uuaauuauuauucaccaguuccc

SEQ ID NO: 78149 - RNA, 23 nt, Artificial Sequence
  Chemically synthesized
uaauuauuauucaccaguuccca

SEQ ID NO: 78150 - RNA, 23 nt, Artificial Sequence
  Chemically synthesized
aauuauuauucaccaguucccaa

SEQ ID NO: 78151 - RNA, 23 nt, Artificial Sequence
  Chemically synthesized
auuauuauucaccaguucccaac

SEQ ID NO: 78152 - RNA, 23 nt, Artificial Sequence
  Chemically synthesized
uuauuauucaccaguucccaacu

SEQ ID NO: 78153 - RNA, 23 nt, Artificial Sequence
  Chemically synthesized
augugaagagccugauuuucauc

SEQ ID NO: 78154 - RNA, 23 nt, Artificial Sequence
  Chemically synthesized
guuaauuauuauucaccaguucc

SEQ ID NO: 78155 - RNA, 23 nt, Artificial Sequence
  Chemically synthesized
guauuuucgucccaguguaaagc

SEQ ID NO: 78156 - RNA, 23 nt, Artificial Sequence
  Chemically synthesized
cuguaaucacgucaguauuuucg

SEQ ID NO: 78157 - RNA, 23 nt, Artificial Sequence
  Chemically synthesized
gagcuuuagguccacagaagaac

SEQ ID NO: 78158 - RNA, 23 nt, Artificial Sequence
  Chemically synthesized
agcuuuagguccacagaagaaca

SEQ ID NO: 78159 - RNA, 23 nt, Artificial Sequence
  Chemically synthesized
uaauuauucuuucacaugcauac

SEQ ID NO: 78160 - RNA, 23 nt, Artificial Sequence
  Chemically synthesized
aauuauucuuucacaugcauaca

SEQ ID NO: 78161 - RNA, 23 nt, Artificial Sequence
  Chemically synthesized
ccugugucuggauguugggucgu

SEQ ID NO: 78162 - RNA, 23 nt, Artificial Sequence
  Chemically synthesized
cugugucuggauguugggucguu

SEQ ID NO: 78163 - RNA, 23 nt, Artificial Sequence
  Chemically synthesized
ugugucuggauguugggucguua

SEQ ID NO: 78164 - RNA, 23 nt, Artificial Sequence
  Chemically synthesized
uguugaaaucgccagaaccuaau

SEQ ID NO: 78165 - RNA, 23 nt, Artificial Sequence
  Chemically synthesized
ggaauuccugguggaguucuuug

SEQ ID NO: 78166 - RNA, 23 nt, Artificial Sequence
  Chemically synthesized
gaauuccugguggaguucuuugg

SEQ ID NO: 78167 - RNA, 23 nt, Artificial Sequence
  Chemically synthesized
aauuccugguggaguucuuugga

SEQ ID NO: 78168 - RNA, 23 nt, Artificial Sequence
  Chemically synthesized
auuccugguggaguucuuuggaa

SEQ ID NO: 78169 - RNA, 23 nt, Artificial Sequence
  Chemically synthesized
uuccugguggaguucuuuggaau

SEQ ID NO: 78170 - RNA, 23 nt, Artificial Sequence
  Chemically synthesized
uuguuguaauagaaaugaacacc

SEQ ID NO: 78171 - RNA, 23 nt, Artificial Sequence
  Chemically synthesized
gaggucaugaucaagacuaaagc

SEQ ID NO: 78172 - RNA, 23 nt, Artificial Sequence
  Chemically synthesized
aguauuuucgucccaguguaaag

SEQ ID NO: 78173 - RNA, 23 nt, Artificial Sequence
  Chemically synthesized
caccuugguaaugacaacuucuu

SEQ ID NO: 78174 - RNA, 23 nt, Artificial Sequence
  Chemically synthesized
guaugguauaguguacuguucac

SEQ ID NO: 78175 - RNA, 23 nt, Artificial Sequence
  Chemically synthesized
uauuuauaagcuaaggaaguaug

SEQ ID NO: 78176 - RNA, 23 nt, Artificial Sequence
  Chemically synthesized
aggaaauuucuucucccucaccu

SEQ ID NO: 78177 - RNA, 23 nt, Artificial Sequence
  Chemically synthesized
uggauguugggucguuaguaagg

SEQ ID NO: 78178 - RNA, 23 nt, Artificial Sequence
  Chemically synthesized
aagcucuugcaucccggcaaauc

SEQ ID NO: 78179 - RNA, 23 nt, Artificial Sequence
  Chemically synthesized
agcucuugcaucccggcaaaucc

SEQ ID NO: 78180 - RNA, 23 nt, Artificial Sequence
  Chemically synthesized
gcucuugcaucccggcaaaucca

SEQ ID NO: 78181 - RNA, 23 nt, Artificial Sequence
  Chemically synthesized
cucuugcaucccggcaaauccag

SEQ ID NO: 78182 - RNA, 23 nt, Artificial Sequence
  Chemically synthesized
ucuugcaucccggcaaauccagu

SEQ ID NO: 78183 - RNA, 23 nt, Artificial Sequence
  Chemically synthesized
ccaguguugaacccaaaauaacu

SEQ ID NO: 78184 - RNA, 23 nt, Artificial Sequence
  Chemically synthesized
ugucuuggguuuggccucgaaca

SEQ ID NO: 78185 - RNA, 23 nt, Artificial Sequence
  Chemically synthesized
gucuuggguuuggccucgaacaa

SEQ ID NO: 78186 - RNA, 23 nt, Artificial Sequence
  Chemically synthesized
ucuuggguuuggccucgaacaau

SEQ ID NO: 78187 - RNA, 23 nt, Artificial Sequence
  Chemically synthesized
cuuggguuuggccucgaacaauc

SEQ ID NO: 78188 - RNA, 23 nt, Artificial Sequence
  Chemically synthesized
uguguaccagaacaacucauagg

SEQ ID NO: 78189 - RNA, 23 nt, Artificial Sequence
  Chemically synthesized
cuucucccucaccugugucugga

SEQ ID NO: 78190 - RNA, 23 nt, Artificial Sequence
  Chemically synthesized
uucucccucaccugugucuggau

SEQ ID NO: 78191 - RNA, 23 nt, Artificial Sequence
  Chemically synthesized
gccauuuuaaagccacgcuuuuu

SEQ ID NO: 78192 - RNA, 23 nt, Artificial Sequence
  Chemically synthesized
uucugcauagcggucucuacaga

SEQ ID NO: 78193 - RNA, 23 nt, Artificial Sequence
  Chemically synthesized
augguguguguaccagaacaacu

SEQ ID NO: 78194 - RNA, 23 nt, Artificial Sequence
  Chemically synthesized
caucugucagggcaguuccaaag

SEQ ID NO: 78195 - RNA, 23 nt, Artificial Sequence
  Chemically synthesized
aucugucagggcaguuccaaagg

SEQ ID NO: 78196 - RNA, 23 nt, Artificial Sequence
  Chemically synthesized
ucugucagggcaguuccaaaggg

SEQ ID NO: 78197 - RNA, 23 nt, Artificial Sequence
  Chemically synthesized
cugucagggcaguuccaaagggc

SEQ ID NO: 78198 - RNA, 23 nt, Artificial Sequence
  Chemically synthesized
ugucagggcaguuccaaagggcc

SEQ ID NO: 78199 - RNA, 23 nt, Artificial Sequence
  Chemically synthesized
gcucuucggcugucaggaaauuu

SEQ ID NO: 78200 - RNA, 23 nt, Artificial Sequence
  Chemically synthesized
cagcuaucccauaggcgaccagu

SEQ ID NO: 78201 - RNA, 23 nt, Artificial Sequence
  Chemically synthesized
agcuaucccauaggcgaccaguu

SEQ ID NO: 78202 - RNA, 23 nt, Artificial Sequence
  Chemically synthesized
gcuaucccauaggcgaccaguuu

SEQ ID NO: 78203 - RNA, 23 nt, Artificial Sequence
  Chemically synthesized
cuaucccauaggcgaccaguuug

SEQ ID NO: 78204 - RNA, 23 nt, Artificial Sequence
  Chemically synthesized
uaucccauaggcgaccaguuugu

SEQ ID NO: 78205 - RNA, 23 nt, Artificial Sequence
  Chemically synthesized
ucauaucaacaggccgucacagg

SEQ ID NO: 78206 - RNA, 23 nt, Artificial Sequence
  Chemically synthesized
cauaucaacaggccgucacagga

SEQ ID NO: 78207 - RNA, 23 nt, Artificial Sequence
  Chemically synthesized
auaucaacaggccgucacaggaa

SEQ ID NO: 78208 - RNA, 23 nt, Artificial Sequence
  Chemically synthesized
uaucaacaggccgucacaggaau

SEQ ID NO: 78209 - RNA, 23 nt, Artificial Sequence
  Chemically synthesized
guugaaaucgccagaaccuaauu

SEQ ID NO: 78210 - RNA, 23 nt, Artificial Sequence
  Chemically synthesized
uugaaaucgccagaaccuaauua

SEQ ID NO: 78211 - RNA, 23 nt, Artificial Sequence
  Chemically synthesized
uagcaauucagugguuguguuug

SEQ ID NO: 78212 - RNA, 23 nt, Artificial Sequence
  Chemically synthesized
ccaaaauaacucguguguaaugg

SEQ ID NO: 78213 - RNA, 23 nt, Artificial Sequence
  Chemically synthesized
ccaaagucuagaagcucuccuug

SEQ ID NO: 78214 - RNA, 23 nt, Artificial Sequence
  Chemically synthesized
caaagucuagaagcucuccuugu

SEQ ID NO: 78215 - RNA, 23 nt, Artificial Sequence
  Chemically synthesized
aaagucuagaagcucuccuuguu

SEQ ID NO: 78216 - RNA, 23 nt, Artificial Sequence
  Chemically synthesized
cucuacagaaggugauguugugc

SEQ ID NO: 78217 - RNA, 23 nt, Artificial Sequence
  Chemically synthesized
uuagaauuagcaugcaguuaaaa

SEQ ID NO: 78218 - RNA, 23 nt, Artificial Sequence
  Chemically synthesized
uccugguggaguucuuuggaauc

SEQ ID NO: 78219 - RNA, 23 nt, Artificial Sequence
  Chemically synthesized
aagcucuccuuguuguaauagaa

SEQ ID NO: 78220 - RNA, 23 nt, Artificial Sequence
  Chemically synthesized
agcucuccuuguuguaauagaaa

SEQ ID NO: 78221 - RNA, 23 nt, Artificial Sequence
  Chemically synthesized
gcucuccuuguuguaauagaaau

SEQ ID NO: 78222 - RNA, 23 nt, Artificial Sequence
  Chemically synthesized
cucuccuuguuguaauagaaaug

SEQ ID NO: 78223 - RNA, 23 nt, Artificial Sequence
  Chemically synthesized
ucuccuuguuguaauagaaauga

SEQ ID NO: 78224 - RNA, 23 nt, Artificial Sequence
  Chemically synthesized
ucugcauagcggucucuacagaa

SEQ ID NO: 78225 - RNA, 23 nt, Artificial Sequence
  Chemically synthesized
ugcauuuguaccauauagauuuc

SEQ ID NO: 78226 - RNA, 23 nt, Artificial Sequence
  Chemically synthesized
guuugugaaaucugagguuuuug

SEQ ID NO: 78227 - RNA, 23 nt, Artificial Sequence
  Chemically synthesized
ccuguaaucacgucaguauuuuc

SEQ ID NO: 78228 - RNA, 23 nt, Artificial Sequence
  Chemically synthesized
gaggguuccuugccagaaaauug

SEQ ID NO: 78229 - RNA, 23 nt, Artificial Sequence
  Chemically synthesized
acucaguugacgaggucaugauc

SEQ ID NO: 78230 - RNA, 23 nt, Artificial Sequence
  Chemically synthesized
cucaguugacgaggucaugauca

SEQ ID NO: 78231 - RNA, 23 nt, Artificial Sequence
  Chemically synthesized
cuccuuguuguaauagaaaugaa

SEQ ID NO: 78232 - RNA, 23 nt, Artificial Sequence
  Chemically synthesized
uccuuguuguaauagaaaugaac

SEQ ID NO: 78233 - RNA, 23 nt, Artificial Sequence
  Chemically synthesized
ccuuguuguaauagaaaugaaca

SEQ ID NO: 78234 - RNA, 23 nt, Artificial Sequence
  Chemically synthesized
cagccaugagaguacuaauaugg

SEQ ID NO: 78235 - RNA, 23 nt, Artificial Sequence
  Chemically synthesized
gauuuucaucccagccgguaaga

SEQ ID NO: 78236 - RNA, 23 nt, Artificial Sequence
  Chemically synthesized
auuuucaucccagccgguaagaa

SEQ ID NO: 78237 - RNA, 23 nt, Artificial Sequence
  Chemically synthesized
uuuucaucccagccgguaagaaa

SEQ ID NO: 78238 - RNA, 23 nt, Artificial Sequence
  Chemically synthesized
uuucaucccagccgguaagaaau

SEQ ID NO: 78239 - RNA, 23 nt, Artificial Sequence
  Chemically synthesized
aggugauguugugcagagagaga

SEQ ID NO: 78240 - RNA, 23 nt, Artificial Sequence
  Chemically synthesized
uuguaggcaaucugcuugaacuc

SEQ ID NO: 78241 - RNA, 23 nt, Artificial Sequence
  Chemically synthesized
uguaggcaaucugcuugaacuca

SEQ ID NO: 78242 - RNA, 23 nt, Artificial Sequence
  Chemically synthesized
guaggcaaucugcuugaacucau

SEQ ID NO: 78243 - RNA, 23 nt, Artificial Sequence
  Chemically synthesized
uaggcaaucugcuugaacucauu

SEQ ID NO: 78244 - RNA, 23 nt, Artificial Sequence
  Chemically synthesized
agcgaagauauggcugggcacug

SEQ ID NO: 78245 - RNA, 23 nt, Artificial Sequence
  Chemically synthesized
gcgaagauauggcugggcacugc

SEQ ID NO: 78246 - RNA, 23 nt, Artificial Sequence
  Chemically synthesized
cgaagauauggcugggcacugca

SEQ ID NO: 78247 - RNA, 23 nt, Artificial Sequence
  Chemically synthesized
gaagauauggcugggcacugcac

SEQ ID NO: 78248 - RNA, 23 nt, Artificial Sequence
  Chemically synthesized
aagauauggcugggcacugcacc

SEQ ID NO: 78249 - RNA, 23 nt, Artificial Sequence
  Chemically synthesized
ccaccuugguaaugacaacuucu

SEQ ID NO: 78250 - RNA, 23 nt, Artificial Sequence
  Chemically synthesized
aagucuagaagcucuccuuguug

SEQ ID NO: 78251 - RNA, 23 nt, Artificial Sequence
  Chemically synthesized
ucccagccgguaagaaauauaug

SEQ ID NO: 78252 - RNA, 23 nt, Artificial Sequence
  Chemically synthesized
cccagccgguaagaaauauauga

SEQ ID NO: 78253 - RNA, 23 nt, Artificial Sequence
  Chemically synthesized
ccagccgguaagaaauauaugau

SEQ ID NO: 78254 - RNA, 23 nt, Artificial Sequence
  Chemically synthesized
cagccgguaagaaauauaugaua

SEQ ID NO: 78255 - RNA, 23 nt, Artificial Sequence
  Chemically synthesized
agccgguaagaaauauaugauaa

SEQ ID NO: 78256 - RNA, 23 nt, Artificial Sequence
  Chemically synthesized
cgucaguauuuucgucccagugu

SEQ ID NO: 78257 - RNA, 23 nt, Artificial Sequence
  Chemically synthesized
gucaguauuuucgucccagugua

SEQ ID NO: 78258 - RNA, 23 nt, Artificial Sequence
  Chemically synthesized
ucaguauuuucgucccaguguaa

SEQ ID NO: 78259 - RNA, 23 nt, Artificial Sequence
  Chemically synthesized
cuugcaucccggcaaauccagua

SEQ ID NO: 78260 - RNA, 23 nt, Artificial Sequence
  Chemically synthesized
caggaaauuucuucucccucacc

SEQ ID NO: 78261 - RNA, 23 nt, Artificial Sequence
  Chemically synthesized
acgauguggaugguugcauuaac

SEQ ID NO: 78262 - RNA, 23 nt, Artificial Sequence
  Chemically synthesized
cgauguggaugguugcauuaaca

SEQ ID NO: 78263 - RNA, 23 nt, Artificial Sequence
  Chemically synthesized
gauguggaugguugcauuaacag

SEQ ID NO: 78264 - RNA, 23 nt, Artificial Sequence
  Chemically synthesized
auguggaugguugcauuaacagc

SEQ ID NO: 78265 - RNA, 23 nt, Artificial Sequence
  Chemically synthesized
cuggauguugggucguuaguaag

SEQ ID NO: 78266 - RNA, 23 nt, Artificial Sequence
  Chemically synthesized
agaacacgccaauacugcugcug

SEQ ID NO: 78267 - RNA, 23 nt, Artificial Sequence
  Chemically synthesized
gaacacgccaauacugcugcugg

SEQ ID NO: 78268 - RNA, 23 nt, Artificial Sequence
  Chemically synthesized
aacacgccaauacugcugcuggg

SEQ ID NO: 78269 - RNA, 23 nt, Artificial Sequence
  Chemically synthesized
uaguaagggcuucccuaguaaau

SEQ ID NO: 78270 - RNA, 23 nt, Artificial Sequence
  Chemically synthesized
acaaugccuggacuugaccucca

SEQ ID NO: 78271 - RNA, 23 nt, Artificial Sequence
  Chemically synthesized
caaugccuggacuugaccuccaa

SEQ ID NO: 78272 - RNA, 23 nt, Artificial Sequence
  Chemically synthesized
aaugccuggacuugaccuccaaa

SEQ ID NO: 78273 - RNA, 23 nt, Artificial Sequence
  Chemically synthesized
uccagcgaagauauggcugggca

SEQ ID NO: 78274 - RNA, 23 nt, Artificial Sequence
  Chemically synthesized
acucauaggaggccugucugaug

SEQ ID NO: 78275 - RNA, 23 nt, Artificial Sequence
  Chemically synthesized
acgguccucugcagcaaauacuu

SEQ ID NO: 78276 - RNA, 23 nt, Artificial Sequence
  Chemically synthesized
cgguccucugcagcaaauacuug

SEQ ID NO: 78277 - RNA, 23 nt, Artificial Sequence
  Chemically synthesized
caguauuuucgucccaguguaaa

SEQ ID NO: 78278 - RNA, 23 nt, Artificial Sequence
  Chemically synthesized
cugcucacucauccguguuucca

SEQ ID NO: 78279 - RNA, 23 nt, Artificial Sequence
  Chemically synthesized
ugcucacucauccguguuuccag

SEQ ID NO: 78280 - RNA, 23 nt, Artificial Sequence
  Chemically synthesized
cggcaaauccaguagaaauacac

SEQ ID NO: 78281 - RNA, 23 nt, Artificial Sequence
  Chemically synthesized
uugaaguguccucgagagagcuu

SEQ ID NO: 78282 - RNA, 23 nt, Artificial Sequence
  Chemically synthesized
ugaaguguccucgagagagcuuu

SEQ ID NO: 78283 - RNA, 23 nt, Artificial Sequence
  Chemically synthesized
agguccacagaagaacacgccaa

SEQ ID NO: 78284 - RNA, 23 nt, Artificial Sequence
  Chemically synthesized
gguccacagaagaacacgccaau

SEQ ID NO: 78285 - RNA, 23 nt, Artificial Sequence
  Chemically synthesized
guccacagaagaacacgccaaua

SEQ ID NO: 78286 - RNA, 23 nt, Artificial Sequence
  Chemically synthesized
auacaucugucagggcaguucca

SEQ ID NO: 78287 - RNA, 23 nt, Artificial Sequence
  Chemically synthesized
uacaucugucagggcaguuccaa

SEQ ID NO: 78288 - RNA, 23 nt, Artificial Sequence
  Chemically synthesized
acaucugucagggcaguuccaaa

SEQ ID NO: 78289 - RNA, 23 nt, Artificial Sequence
  Chemically synthesized
ugaccuccaaagucuagaagcuc

SEQ ID NO: 78290 - RNA, 23 nt, Artificial Sequence
  Chemically synthesized
aucccauaggcgaccaguuugug

SEQ ID NO: 78291 - RNA, 23 nt, Artificial Sequence
  Chemically synthesized
gacugucuuggguuuggccucga

SEQ ID NO: 78292 - RNA, 23 nt, Artificial Sequence
  Chemically synthesized
acugucuuggguuuggccucgaa

SEQ ID NO: 78293 - RNA, 23 nt, Artificial Sequence
  Chemically synthesized
cccaacugggagcucauaucaac

SEQ ID NO: 78294 - RNA, 23 nt, Artificial Sequence
  Chemically synthesized
ccaacugggagcucauaucaaca

SEQ ID NO: 78295 - RNA, 23 nt, Artificial Sequence
  Chemically synthesized
gccgucacaggaauuccuggugg

SEQ ID NO: 78296 - RNA, 23 nt, Artificial Sequence
  Chemically synthesized
ccgucacaggaauuccuggugga

SEQ ID NO: 78297 - RNA, 23 nt, Artificial Sequence
  Chemically synthesized
gucacaggaauuccugguggagu

SEQ ID NO: 78298 - RNA, 23 nt, Artificial Sequence
  Chemically synthesized
ucacaggaauuccugguggaguu

SEQ ID NO: 78299 - RNA, 23 nt, Artificial Sequence
  Chemically synthesized
agccuguaaucacgucaguauuu

SEQ ID NO: 78300 - RNA, 23 nt, Artificial Sequence
  Chemically synthesized
gccuguaaucacgucaguauuuu

SEQ ID NO: 78301 - RNA, 23 nt, Artificial Sequence
  Chemically synthesized
gaagcucuccuuguuguaauaga

SEQ ID NO: 78302 - RNA, 23 nt, Artificial Sequence
  Chemically synthesized
ugugccucacugcauuuguacca

SEQ ID NO: 78303 - RNA, 23 nt, Artificial Sequence
  Chemically synthesized
gugccucacugcauuuguaccau

SEQ ID NO: 78304 - RNA, 23 nt, Artificial Sequence
  Chemically synthesized
ugccucacugcauuuguaccaua

SEQ ID NO: 78305 - RNA, 23 nt, Artificial Sequence
  Chemically synthesized
cacgguccucugcagcaaauacu

SEQ ID NO: 78306 - RNA, 23 nt, Artificial Sequence
  Chemically synthesized
uagaauuagcaugcaguuaaaau

SEQ ID NO: 78307 - RNA, 23 nt, Artificial Sequence
  Chemically synthesized
ccggaugugcacgcugaaaaagu

SEQ ID NO: 78308 - RNA, 23 nt, Artificial Sequence
  Chemically synthesized
acaacucauaggaggccugucug

SEQ ID NO: 78309 - RNA, 23 nt, Artificial Sequence
  Chemically synthesized
caacucauaggaggccugucuga

SEQ ID NO: 78310 - RNA, 23 nt, Artificial Sequence
  Chemically synthesized
aacucauaggaggccugucugau

SEQ ID NO: 78311 - RNA, 23 nt, Artificial Sequence
  Chemically synthesized
ggugacgccugcuauuguccuua

SEQ ID NO: 78312 - RNA, 23 nt, Artificial Sequence
  Chemically synthesized
gugacgccugcuauuguccuuag

SEQ ID NO: 78313 - RNA, 23 nt, Artificial Sequence
  Chemically synthesized
ugacgccugcuauuguccuuagc

SEQ ID NO: 78314 - RNA, 23 nt, Artificial Sequence
  Chemically synthesized
gacgccugcuauuguccuuagca

SEQ ID NO: 78315 - RNA, 23 nt, Artificial Sequence
  Chemically synthesized
acgccugcuauuguccuuagcaa

SEQ ID NO: 78316 - RNA, 23 nt, Artificial Sequence
  Chemically synthesized
uucaucccagccgguaagaaaua

SEQ ID NO: 78317 - RNA, 23 nt, Artificial Sequence
  Chemically synthesized
gugucuggauguugggucguuag

SEQ ID NO: 78318 - RNA, 23 nt, Artificial Sequence
  Chemically synthesized
ugucuggauguugggucguuagu

SEQ ID NO: 78319 - RNA, 23 nt, Artificial Sequence
  Chemically synthesized
gucuggauguugggucguuagua

SEQ ID NO: 78320 - RNA, 23 nt, Artificial Sequence
  Chemically synthesized
ucuggauguugggucguuaguaa

SEQ ID NO: 78321 - RNA, 23 nt, Artificial Sequence
  Chemically synthesized
cccaaaauaacucguguguaaug

SEQ ID NO: 78322 - RNA, 23 nt, Artificial Sequence
  Chemically synthesized
augccuggacuugaccuccaaag

SEQ ID NO: 78323 - RNA, 23 nt, Artificial Sequence
  Chemically synthesized
ugccuggacuugaccuccaaagu

SEQ ID NO: 78324 - RNA, 23 nt, Artificial Sequence
  Chemically synthesized
gccuggacuugaccuccaaaguc

SEQ ID NO: 78325 - RNA, 23 nt, Artificial Sequence
  Chemically synthesized
ucaucccagccgguaagaaauau

SEQ ID NO: 78326 - RNA, 23 nt, Artificial Sequence
  Chemically synthesized
caucccagccgguaagaaauaua

SEQ ID NO: 78327 - RNA, 23 nt, Artificial Sequence
  Chemically synthesized
aucccagccgguaagaaauauau

SEQ ID NO: 78328 - RNA, 23 nt, Artificial Sequence
  Chemically synthesized
gccgguaagaaauauaugauaac

SEQ ID NO: 78329 - RNA, 23 nt, Artificial Sequence
  Chemically synthesized
uugcucuucggcugucaggaaau

SEQ ID NO: 78330 - RNA, 23 nt, Artificial Sequence
  Chemically synthesized
ugcucuucggcugucaggaaauu

SEQ ID NO: 78331 - RNA, 23 nt, Artificial Sequence
  Chemically synthesized
acagcuaucccauaggcgaccag

SEQ ID NO: 78332 - RNA, 23 nt, Artificial Sequence
  Chemically synthesized
ggggucugugccucacugcauuu

SEQ ID NO: 78333 - RNA, 23 nt, Artificial Sequence
  Chemically synthesized
ugggcacugcaccaagauguacu

SEQ ID NO: 78334 - RNA, 23 nt, Artificial Sequence
  Chemically synthesized
acaugguguguguaccagaacaa

SEQ ID NO: 78335 - RNA, 23 nt, Artificial Sequence
  Chemically synthesized
caugguguguguaccagaacaac

SEQ ID NO: 78336 - RNA, 23 nt, Artificial Sequence
  Chemically synthesized
ucgacugacagguauuagaauua

SEQ ID NO: 78337 - RNA, 23 nt, Artificial Sequence
  Chemically synthesized
guguacuguucacaauaguuaau

SEQ ID NO: 78338 - RNA, 23 nt, Artificial Sequence
  Chemically synthesized
uguacuguucacaauaguuaauu

SEQ ID NO: 78339 - RNA, 23 nt, Artificial Sequence
  Chemically synthesized
gccacugucugccauucugcaua

SEQ ID NO: 78340 - RNA, 23 nt, Artificial Sequence
  Chemically synthesized
ccaguucccaacugggagcucau

SEQ ID NO: 78341 - RNA, 23 nt, Artificial Sequence
  Chemically synthesized
caguucccaacugggagcucaua

SEQ ID NO: 78342 - RNA, 23 nt, Artificial Sequence
  Chemically synthesized
aguucccaacugggagcucauau

SEQ ID NO: 78343 - RNA, 23 nt, Artificial Sequence
  Chemically synthesized
guucccaacugggagcucauauc

SEQ ID NO: 78344 - RNA, 23 nt, Artificial Sequence
  Chemically synthesized
uucccaacugggagcucauauca

SEQ ID NO: 78345 - RNA, 19 nt, Artificial Sequence
  Chemically synthesized
cgagcaacagguuggugaa

SEQ ID NO: 78346 - RNA, 19 nt, Artificial Sequence
  Chemically synthesized
cgaucguagaaacacagaa

SEQ ID NO: 78347 - RNA, 19 nt, Artificial Sequence
  Chemically synthesized
guagaaacacagaauggga

SEQ ID NO: 78348 - RNA, 19 nt, Artificial Sequence
  Chemically synthesized
gagcaacagguuggugaaa

SEQ ID NO: 78349 - RNA, 19 nt, Artificial Sequence
  Chemically synthesized
cuuuggaaauccagcugca

SEQ ID NO: 78350 - RNA, 19 nt, Artificial Sequence
  Chemically synthesized
gcgaucguagaaacacaga

SEQ ID NO: 78351 - RNA, 19 nt, Artificial Sequence
  Chemically synthesized
guuggcacuucgagaagga

SEQ ID NO: 78352 - RNA, 19 nt, Artificial Sequence
  Chemically synthesized
caggcggaacuuguaggaa

SEQ ID NO: 78353 - RNA, 19 nt, Artificial Sequence
  Chemically synthesized
uggagcgaucguagaaaca

SEQ ID NO: 78354 - RNA, 19 nt, Artificial Sequence
  Chemically synthesized
gagaguaaagacagcgccu

SEQ ID NO: 78355 - RNA, 19 nt, Artificial Sequence
  Chemically synthesized
cgagaaggaaguggagagu

SEQ ID NO: 78356 - RNA, 19 nt, Artificial Sequence
  Chemically synthesized
aggaaguggagaguaaaga

SEQ ID NO: 78357 - RNA, 19 nt, Artificial Sequence
  Chemically synthesized
aacccuguguccuuggaga

SEQ ID NO: 78358 - RNA, 19 nt, Artificial Sequence
  Chemically synthesized
uuggcacuucgagaaggaa

SEQ ID NO: 78359 - RNA, 19 nt, Artificial Sequence
  Chemically synthesized
ggcacuucgagaaggaagu

SEQ ID NO: 78360 - RNA, 19 nt, Artificial Sequence
  Chemically synthesized
agcugguucccguuuucca

SEQ ID NO: 78361 - RNA, 19 nt, Artificial Sequence
  Chemically synthesized
aguggagaguaaagacagc

SEQ ID NO: 78362 - RNA, 19 nt, Artificial Sequence
  Chemically synthesized
cuguguccuuggagaaagc

SEQ ID NO: 78363 - RNA, 19 nt, Artificial Sequence
  Chemically synthesized
aaggaaguggagaguaaag

SEQ ID NO: 78364 - RNA, 19 nt, Artificial Sequence
  Chemically synthesized
aguaaagacagcgccugga

SEQ ID NO: 78365 - RNA, 19 nt, Artificial Sequence
  Chemically synthesized
gagaaagcugguucccguu

SEQ ID NO: 78366 - RNA, 19 nt, Artificial Sequence
  Chemically synthesized
ggugaaaacccuguguccu

SEQ ID NO: 78367 - RNA, 19 nt, Artificial Sequence
  Chemically synthesized
acuucgagaaggaagugga

SEQ ID NO: 78368 - RNA, 19 nt, Artificial Sequence
  Chemically synthesized
aaguggagaguaaagacag

SEQ ID NO: 78369 - RNA, 19 nt, Artificial Sequence
  Chemically synthesized
cuucgagaaggaaguggag

SEQ ID NO: 78370 - RNA, 19 nt, Artificial Sequence
  Chemically synthesized
cugguucccguuuuccaga

SEQ ID NO: 78371 - RNA, 19 nt, Artificial Sequence
  Chemically synthesized
agaaacacagaaugggacu

SEQ ID NO: 78372 - RNA, 19 nt, Artificial Sequence
  Chemically synthesized
cguagaaacacagaauggg

SEQ ID NO: 78373 - RNA, 19 nt, Artificial Sequence
  Chemically synthesized
ucgagaaggaaguggagag

SEQ ID NO: 78374 - RNA, 19 nt, Artificial Sequence
  Chemically synthesized
gugaaaacccuguguccuu

SEQ ID NO: 78375 - RNA, 19 nt, Artificial Sequence
  Chemically synthesized
guccuuggagaaagcuggu

SEQ ID NO: 78376 - RNA, 19 nt, Artificial Sequence
  Chemically synthesized
guuggugaaaacccugugu

SEQ ID NO: 78377 - RNA, 19 nt, Artificial Sequence
  Chemically synthesized
aaagcugguucccguuuuc

SEQ ID NO: 78378 - RNA, 19 nt, Artificial Sequence
  Chemically synthesized
uuggaaauccagcugcaga

SEQ ID NO: 78379 - RNA, 19 nt, Artificial Sequence
  Chemically synthesized
uucgagaaggaaguggaga

SEQ ID NO: 78380 - RNA, 19 nt, Artificial Sequence
  Chemically synthesized
aaaacccuguguccuugga

SEQ ID NO: 78381 - RNA, 19 nt, Artificial Sequence
  Chemically synthesized
auccagcugcagaaacaga

SEQ ID NO: 78382 - RNA, 19 nt, Artificial Sequence
  Chemically synthesized
uagaaacacagaaugggac

SEQ ID NO: 78383 - RNA, 19 nt, Artificial Sequence
  Chemically synthesized
uguccuuggagaaagcugg

SEQ ID NO: 78384 - RNA, 19 nt, Artificial Sequence
  Chemically synthesized
cagcugcagaaacagacac

SEQ ID NO: 78385 - RNA, 19 nt, Artificial Sequence
  Chemically synthesized
ucguagaaacacagaaugg

SEQ ID NO: 78386 - RNA, 19 nt, Artificial Sequence
  Chemically synthesized
uggcacuucgagaaggaag

SEQ ID NO: 78387 - RNA, 19 nt, Artificial Sequence
  Chemically synthesized
agguuggugaaaacccugu

SEQ ID NO: 78388 - RNA, 19 nt, Artificial Sequence
  Chemically synthesized
aagcccuuuggaaauccag

SEQ ID NO: 78389 - RNA, 19 nt, Artificial Sequence
  Chemically synthesized
uggagaguaaagacagcgc

SEQ ID NO: 78390 - RNA, 19 nt, Artificial Sequence
  Chemically synthesized
ugaaaacccuguguccuug

SEQ ID NO: 78391 - RNA, 19 nt, Artificial Sequence
  Chemically synthesized
aacacagaaugggacuggg

SEQ ID NO: 78392 - RNA, 19 nt, Artificial Sequence
  Chemically synthesized
uggugaaaacccugugucc

SEQ ID NO: 78393 - RNA, 19 nt, Artificial Sequence
  Chemically synthesized
guguccuuggagaaagcug

SEQ ID NO: 78394 - RNA, 19 nt, Artificial Sequence
  Chemically synthesized
uuuggaaauccagcugcag

SEQ ID NO: 78395 - RNA, 19 nt, Artificial Sequence
  Chemically synthesized
aaacccuguguccuuggag

SEQ ID NO: 78396 - RNA, 19 nt, Artificial Sequence
  Chemically synthesized
aauccagcugcagaaacag

SEQ ID NO: 78397 - RNA, 19 nt, Artificial Sequence
  Chemically synthesized
agcccuuuggaaauccagc

SEQ ID NO: 78398 - RNA, 19 nt, Artificial Sequence
  Chemically synthesized
aucguagaaacacagaaug

SEQ ID NO: 78399 - RNA, 19 nt, Artificial Sequence
  Chemically synthesized
cuuggagaaagcugguucc

SEQ ID NO: 78400 - RNA, 19 nt, Artificial Sequence
  Chemically synthesized
uguguccuuggagaaagcu

SEQ ID NO: 78401 - RNA, 19 nt, Artificial Sequence
  Chemically synthesized
ccuuuggaaauccagcugc

SEQ ID NO: 78402 - RNA, 19 nt, Artificial Sequence
  Chemically synthesized
gcacuucgagaaggaagug

SEQ ID NO: 78403 - RNA, 19 nt, Artificial Sequence
  Chemically synthesized
uccagcugcagaaacagac

SEQ ID NO: 78404 - RNA, 19 nt, Artificial Sequence
  Chemically synthesized
ugguucccguuuuccagag

SEQ ID NO: 78405 - RNA, 19 nt, Artificial Sequence
  Chemically synthesized
aaugcuauuuacauacagc

SEQ ID NO: 78406 - RNA, 19 nt, Artificial Sequence
  Chemically synthesized
guggagaguaaagacagcg

SEQ ID NO: 78407 - RNA, 19 nt, Artificial Sequence
  Chemically synthesized
gaaaacccuguguccuugg

SEQ ID NO: 78408 - RNA, 19 nt, Artificial Sequence
  Chemically synthesized
caacagguuggugaaaacc

SEQ ID NO: 78409 - RNA, 19 nt, Artificial Sequence
  Chemically synthesized
ugcuauuuacauacagcuc

SEQ ID NO: 78410 - RNA, 19 nt, Artificial Sequence
  Chemically synthesized
agcugcagaaacagacacc

SEQ ID NO: 78411 - RNA, 19 nt, Artificial Sequence
  Chemically synthesized
gaaacacagaaugggacug

SEQ ID NO: 78412 - RNA, 19 nt, Artificial Sequence
  Chemically synthesized
aagcugguucccguuuucc

SEQ ID NO: 78413 - RNA, 19 nt, Artificial Sequence
  Chemically synthesized
aacagguuggugaaaaccc

SEQ ID NO: 78414 - RNA, 19 nt, Artificial Sequence
  Chemically synthesized
uuggugaaaacccuguguc

SEQ ID NO: 78415 - RNA, 19 nt, Artificial Sequence
  Chemically synthesized
cacuucgagaaggaagugg

SEQ ID NO: 78416 - RNA, 19 nt, Artificial Sequence
  Chemically synthesized
aaacacagaaugggacugg

SEQ ID NO: 78417 - RNA, 19 nt, Artificial Sequence
  Chemically synthesized
uuggagaaagcugguuccc

SEQ ID NO: 78418 - RNA, 19 nt, Artificial Sequence
  Chemically synthesized
uucaccaaccuguugcucg

SEQ ID NO: 78419 - RNA, 19 nt, Artificial Sequence
  Chemically synthesized
uucuguguuucuacgaucg

SEQ ID NO: 78420 - RNA, 19 nt, Artificial Sequence
  Chemically synthesized
ucccauucuguguuucuac

SEQ ID NO: 78421 - RNA, 19 nt, Artificial Sequence
  Chemically synthesized
uuucaccaaccuguugcuc

SEQ ID NO: 78422 - RNA, 19 nt, Artificial Sequence
  Chemically synthesized
ugcagcuggauuuccaaag

SEQ ID NO: 78423 - RNA, 19 nt, Artificial Sequence
  Chemically synthesized
ucuguguuucuacgaucgc

SEQ ID NO: 78424 - RNA, 19 nt, Artificial Sequence
  Chemically synthesized
uccuucucgaagugccaac

SEQ ID NO: 78425 - RNA, 19 nt, Artificial Sequence
  Chemically synthesized
uuccuacaaguuccgccug

SEQ ID NO: 78426 - RNA, 19 nt, Artificial Sequence
  Chemically synthesized
uguuucuacgaucgcucca

SEQ ID NO: 78427 - RNA, 19 nt, Artificial Sequence
  Chemically synthesized
aggcgcugucuuuacucuc

SEQ ID NO: 78428 - RNA, 19 nt, Artificial Sequence
  Chemically synthesized
acucuccacuuccuucucg

SEQ ID NO: 78429 - RNA, 19 nt, Artificial Sequence
  Chemically synthesized
ucuuuacucuccacuuccu

SEQ ID NO: 78430 - RNA, 19 nt, Artificial Sequence
  Chemically synthesized
ucuccaaggacacaggguu

SEQ ID NO: 78431 - RNA, 19 nt, Artificial Sequence
  Chemically synthesized
uuccuucucgaagugccaa

SEQ ID NO: 78432 - RNA, 19 nt, Artificial Sequence
  Chemically synthesized
acuuccuucucgaagugcc

SEQ ID NO: 78433 - RNA, 19 nt, Artificial Sequence
  Chemically synthesized
uggaaaacgggaaccagcu

SEQ ID NO: 78434 - RNA, 19 nt, Artificial Sequence
  Chemically synthesized
gcugucuuuacucuccacu

SEQ ID NO: 78435 - RNA, 19 nt, Artificial Sequence
  Chemically synthesized
gcuuucuccaaggacacag

SEQ ID NO: 78436 - RNA, 19 nt, Artificial Sequence
  Chemically synthesized
cuuuacucuccacuuccuu

SEQ ID NO: 78437 - RNA, 19 nt, Artificial Sequence
  Chemically synthesized
uccaggcgcugucuuuacu

SEQ ID NO: 78438 - RNA, 19 nt, Artificial Sequence
  Chemically synthesized
aacgggaaccagcuuucuc

SEQ ID NO: 78439 - RNA, 19 nt, Artificial Sequence
  Chemically synthesized
aggacacaggguuuucacc

SEQ ID NO: 78440 - RNA, 19 nt, Artificial Sequence
  Chemically synthesized
uccacuuccuucucgaagu

SEQ ID NO: 78441 - RNA, 19 nt, Artificial Sequence
  Chemically synthesized
cugucuuuacucuccacuu

SEQ ID NO: 78442 - RNA, 19 nt, Artificial Sequence
  Chemically synthesized
cuccacuuccuucucgaag

SEQ ID NO: 78443 - RNA, 19 nt, Artificial Sequence
  Chemically synthesized
ucuggaaaacgggaaccag

SEQ ID NO: 78444 - RNA, 19 nt, Artificial Sequence
  Chemically synthesized
agucccauucuguguuucu

SEQ ID NO: 78445 - RNA, 19 nt, Artificial Sequence
  Chemically synthesized
cccauucuguguuucuacg

SEQ ID NO: 78446 - RNA, 19 nt, Artificial Sequence
  Chemically synthesized
cucuccacuuccuucucga

SEQ ID NO: 78447 - RNA, 19 nt, Artificial Sequence
  Chemically synthesized
aaggacacaggguuuucac

SEQ ID NO: 78448 - RNA, 19 nt, Artificial Sequence
  Chemically synthesized
accagcuuucuccaaggac

SEQ ID NO: 78449 - RNA, 19 nt, Artificial Sequence
  Chemically synthesized
acacaggguuuucaccaac

SEQ ID NO: 78450 - RNA, 19 nt, Artificial Sequence
  Chemically synthesized
gaaaacgggaaccagcuuu

SEQ ID NO: 78451 - RNA, 19 nt, Artificial Sequence
  Chemically synthesized
ucugcagcuggauuuccaa

SEQ ID NO: 78452 - RNA, 19 nt, Artificial Sequence
  Chemically synthesized
ucuccacuuccuucucgaa

SEQ ID NO: 78453 - RNA, 19 nt, Artificial Sequence
  Chemically synthesized
uccaaggacacaggguuuu

SEQ ID NO: 78454 - RNA, 19 nt, Artificial Sequence
  Chemically synthesized
ucuguuucugcagcuggau

SEQ ID NO: 78455 - RNA, 19 nt, Artificial Sequence
  Chemically synthesized
gucccauucuguguuucua

SEQ ID NO: 78456 - RNA, 19 nt, Artificial Sequence
  Chemically synthesized
ccagcuuucuccaaggaca

SEQ ID NO: 78457 - RNA, 19 nt, Artificial Sequence
  Chemically synthesized
gugucuguuucugcagcug

SEQ ID NO: 78458 - RNA, 19 nt, Artificial Sequence
  Chemically synthesized
ccauucuguguuucuacga

SEQ ID NO: 78459 - RNA, 19 nt, Artificial Sequence
  Chemically synthesized
cuuccuucucgaagugcca

SEQ ID NO: 78460 - RNA, 19 nt, Artificial Sequence
  Chemically synthesized
acaggguuuucaccaaccu

SEQ ID NO: 78461 - RNA, 19 nt, Artificial Sequence
  Chemically synthesized
cuggauuuccaaagggcuu

SEQ ID NO: 78462 - RNA, 19 nt, Artificial Sequence
  Chemically synthesized
gcgcugucuuuacucucca

SEQ ID NO: 78463 - RNA, 19 nt, Artificial Sequence
  Chemically synthesized
caaggacacaggguuuuca

SEQ ID NO: 78464 - RNA, 19 nt, Artificial Sequence
  Chemically synthesized
cccagucccauucuguguu

SEQ ID NO: 78465 - RNA, 19 nt, Artificial Sequence
  Chemically synthesized
ggacacaggguuuucacca

SEQ ID NO: 78466 - RNA, 19 nt, Artificial Sequence
  Chemically synthesized
cagcuuucuccaaggacac

SEQ ID NO: 78467 - RNA, 19 nt, Artificial Sequence
  Chemically synthesized
cugcagcuggauuuccaaa

SEQ ID NO: 78468 - RNA, 19 nt, Artificial Sequence
  Chemically synthesized
cuccaaggacacaggguuu

SEQ ID NO: 78469 - RNA, 19 nt, Artificial Sequence
  Chemically synthesized
cuguuucugcagcuggauu

SEQ ID NO: 78470 - RNA, 19 nt, Artificial Sequence
  Chemically synthesized
gcuggauuuccaaagggcu

SEQ ID NO: 78471 - RNA, 19 nt, Artificial Sequence
  Chemically synthesized
cauucuguguuucuacgau

SEQ ID NO: 78472 - RNA, 19 nt, Artificial Sequence
  Chemically synthesized
ggaaccagcuuucuccaag

SEQ ID NO: 78473 - RNA, 19 nt, Artificial Sequence
  Chemically synthesized
agcuuucuccaaggacaca

SEQ ID NO: 78474 - RNA, 19 nt, Artificial Sequence
  Chemically synthesized
gcagcuggauuuccaaagg

SEQ ID NO: 78475 - RNA, 19 nt, Artificial Sequence
  Chemically synthesized
cacuuccuucucgaagugc

SEQ ID NO: 78476 - RNA, 19 nt, Artificial Sequence
  Chemically synthesized
gucuguuucugcagcugga

SEQ ID NO: 78477 - RNA, 19 nt, Artificial Sequence
  Chemically synthesized
cucuggaaaacgggaacca

SEQ ID NO: 78478 - RNA, 19 nt, Artificial Sequence
  Chemically synthesized
gcuguauguaaauagcauu

SEQ ID NO: 78479 - RNA, 19 nt, Artificial Sequence
  Chemically synthesized
cgcugucuuuacucuccac

SEQ ID NO: 78480 - RNA, 19 nt, Artificial Sequence
  Chemically synthesized
ccaaggacacaggguuuuc

SEQ ID NO: 78481 - RNA, 19 nt, Artificial Sequence
  Chemically synthesized
gguuuucaccaaccuguug

SEQ ID NO: 78482 - RNA, 19 nt, Artificial Sequence
  Chemically synthesized
gagcuguauguaaauagca

SEQ ID NO: 78483 - RNA, 19 nt, Artificial Sequence
  Chemically synthesized
ggugucuguuucugcagcu

SEQ ID NO: 78484 - RNA, 19 nt, Artificial Sequence
  Chemically synthesized
cagucccauucuguguuuc

SEQ ID NO: 78485 - RNA, 19 nt, Artificial Sequence
  Chemically synthesized
ggaaaacgggaaccagcuu

SEQ ID NO: 78486 - RNA, 19 nt, Artificial Sequence
  Chemically synthesized
ggguuuucaccaaccuguu

SEQ ID NO: 78487 - RNA, 19 nt, Artificial Sequence
  Chemically synthesized
gacacaggguuuucaccaa

SEQ ID NO: 78488 - RNA, 19 nt, Artificial Sequence
  Chemically synthesized
ccacuuccuucucgaagug

SEQ ID NO: 78489 - RNA, 19 nt, Artificial Sequence
  Chemically synthesized
ccagucccauucuguguuu

SEQ ID NO: 78490 - RNA, 19 nt, Artificial Sequence
  Chemically synthesized
gggaaccagcuuucuccaa

SEQ ID NO: 78491 - RNA, 21 nt, Artificial Sequence
  Chemically synthesized
cgagaaggaaguggagaguaa

SEQ ID NO: 78492 - RNA, 21 nt, Artificial Sequence
  Chemically synthesized
gagaaggaaguggagaguaaa

SEQ ID NO: 78493 - RNA, 21 nt, Artificial Sequence
  Chemically synthesized
gaaggaaguggagaguaaaga

SEQ ID NO: 78494 - RNA, 21 nt, Artificial Sequence
  Chemically synthesized
gcgagcaacagguuggugaaa

SEQ ID NO: 78495 - RNA, 21 nt, Artificial Sequence
  Chemically synthesized
cuuuggaaauccagcugcaga

SEQ ID NO: 78496 - RNA, 21 nt, Artificial Sequence
  Chemically synthesized
uuuggaaauccagcugcagaa

SEQ ID NO: 78497 - RNA, 21 nt, Artificial Sequence
  Chemically synthesized
aggaaguggagaguaaagaca

SEQ ID NO: 78498 - RNA, 21 nt, Artificial Sequence
  Chemically synthesized
agaaggaaguggagaguaaag

SEQ ID NO: 78499 - RNA, 21 nt, Artificial Sequence
  Chemically synthesized
agcgagcaacagguuggugaa

SEQ ID NO: 78500 - RNA, 21 nt, Artificial Sequence
  Chemically synthesized
cguagaaacacagaaugggac

SEQ ID NO: 78501 - RNA, 21 nt, Artificial Sequence
  Chemically synthesized
ucgagaaggaaguggagagua

SEQ ID NO: 78502 - RNA, 21 nt, Artificial Sequence
  Chemically synthesized
agcugguucccguuuuccaga

SEQ ID NO: 78503 - RNA, 21 nt, Artificial Sequence
  Chemically synthesized
gcgaucguagaaacacagaau

SEQ ID NO: 78504 - RNA, 21 nt, Artificial Sequence
  Chemically synthesized
cgaucguagaaacacagaaug

SEQ ID NO: 78505 - RNA, 21 nt, Artificial Sequence
  Chemically synthesized
gcacuucgagaaggaagugga

SEQ ID NO: 78506 - RNA, 21 nt, Artificial Sequence
  Chemically synthesized
aacccuguguccuuggagaaa

SEQ ID NO: 78507 - RNA, 21 nt, Artificial Sequence
  Chemically synthesized
aaauccagcugcagaaacaga

SEQ ID NO: 78508 - RNA, 21 nt, Artificial Sequence
  Chemically synthesized
agaguaaagacagcgccugga

SEQ ID NO: 78509 - RNA, 21 nt, Artificial Sequence
  Chemically synthesized
aaagcugguucccguuuucca

SEQ ID NO: 78510 - RNA, 21 nt, Artificial Sequence
  Chemically synthesized
uggagcgaucguagaaacaca

SEQ ID NO: 78511 - RNA, 21 nt, Artificial Sequence
  Chemically synthesized
acagguuggugaaaacccugu

SEQ ID NO: 78512 - RNA, 21 nt, Artificial Sequence
  Chemically synthesized
gaucguagaaacacagaaugg

SEQ ID NO: 78513 - RNA, 21 nt, Artificial Sequence
  Chemically synthesized
acuucgagaaggaaguggaga

SEQ ID NO: 78514 - RNA, 21 nt, Artificial Sequence
  Chemically synthesized
aaggaaguggagaguaaagac

SEQ ID NO: 78515 - RNA, 21 nt, Artificial Sequence
  Chemically synthesized
gaaguggagaguaaagacagc

SEQ ID NO: 78516 - RNA, 21 nt, Artificial Sequence
  Chemically synthesized
cuucgagaaggaaguggagag

SEQ ID NO: 78517 - RNA, 21 nt, Artificial Sequence
  Chemically synthesized
guuggcacuucgagaaggaag

SEQ ID NO: 78518 - RNA, 21 nt, Artificial Sequence
  Chemically synthesized
cuguguccuuggagaaagcug

SEQ ID NO: 78519 - RNA, 21 nt, Artificial Sequence
  Chemically synthesized
guguccuuggagaaagcuggu

SEQ ID NO: 78520 - RNA, 21 nt, Artificial Sequence
  Chemically synthesized
aaaacccuguguccuuggaga

SEQ ID NO: 78521 - RNA, 21 nt, Artificial Sequence
  Chemically synthesized
ugaaaacccuguguccuugga

SEQ ID NO: 78522 - RNA, 21 nt, Artificial Sequence
  Chemically synthesized
gugaaaacccuguguccuugg

SEQ ID NO: 78523 - RNA, 21 nt, Artificial Sequence
  Chemically synthesized
caacagguuggugaaaacccu

SEQ ID NO: 78524 - RNA, 21 nt, Artificial Sequence
  Chemically synthesized
uggagaguaaagacagcgccu

SEQ ID NO: 78525 - RNA, 21 nt, Artificial Sequence
  Chemically synthesized
gcaacagguuggugaaaaccc

SEQ ID NO: 78526 - RNA, 21 nt, Artificial Sequence
  Chemically synthesized
ggugaaaacccuguguccuug

SEQ ID NO: 78527 - RNA, 21 nt, Artificial Sequence
  Chemically synthesized
uguccuuggagaaagcugguu

SEQ ID NO: 78528 - RNA, 21 nt, Artificial Sequence
  Chemically synthesized
aguggagaguaaagacagcgc

SEQ ID NO: 78529 - RNA, 21 nt, Artificial Sequence
  Chemically synthesized
gaaagcugguucccguuuucc

SEQ ID NO: 78530 - RNA, 21 nt, Artificial Sequence
  Chemically synthesized
aacagguuggugaaaacccug

SEQ ID NO: 78531 - RNA, 21 nt, Artificial Sequence
  Chemically synthesized
aaguggagaguaaagacagcg

SEQ ID NO: 78532 - RNA, 21 nt, Artificial Sequence
  Chemically synthesized
cacuucgagaaggaaguggag

SEQ ID NO: 78533 - RNA, 21 nt, Artificial Sequence
  Chemically synthesized
uuggagaaagcugguucccgu

SEQ ID NO: 78534 - RNA, 21 nt, Artificial Sequence
  Chemically synthesized
auccagcugcagaaacagaca

SEQ ID NO: 78535 - RNA, 21 nt, Artificial Sequence
  Chemically synthesized
uccagcugcagaaacagacac

SEQ ID NO: 78536 - RNA, 21 nt, Artificial Sequence
  Chemically synthesized
gaagcccuuuggaaauccagc

SEQ ID NO: 78537 - RNA, 21 nt, Artificial Sequence
  Chemically synthesized
cuggagcgaucguagaaacac

SEQ ID NO: 78538 - RNA, 21 nt, Artificial Sequence
  Chemically synthesized
uuggcacuucgagaaggaagu

SEQ ID NO: 78539 - RNA, 21 nt, Artificial Sequence
  Chemically synthesized
guuggugaaaacccugugucc

SEQ ID NO: 78540 - RNA, 21 nt, Artificial Sequence
  Chemically synthesized
gaaacacagaaugggacuggg

SEQ ID NO: 78541 - RNA, 21 nt, Artificial Sequence
  Chemically synthesized
aagcccuuuggaaauccagcu

SEQ ID NO: 78542 - RNA, 21 nt, Artificial Sequence
  Chemically synthesized
aagcugguucccguuuuccag

SEQ ID NO: 78543 - RNA, 21 nt, Artificial Sequence
  Chemically synthesized
acccuguguccuuggagaaag

SEQ ID NO: 78544 - RNA, 21 nt, Artificial Sequence
  Chemically synthesized
aucguagaaacacagaauggg

SEQ ID NO: 78545 - RNA, 21 nt, Artificial Sequence
  Chemically synthesized
aaugcuauuuacauacagcuc

SEQ ID NO: 78546 - RNA, 21 nt, Artificial Sequence
  Chemically synthesized
uucgagaaggaaguggagagu

SEQ ID NO: 78547 - RNA, 21 nt, Artificial Sequence
  Chemically synthesized
uuggugaaaacccuguguccu

SEQ ID NO: 78548 - RNA, 21 nt, Artificial Sequence
  Chemically synthesized
uguguccuuggagaaagcugg

SEQ ID NO: 78549 - RNA, 21 nt, Artificial Sequence
  Chemically synthesized
agcaacagguuggugaaaacc

SEQ ID NO: 78550 - RNA, 21 nt, Artificial Sequence
  Chemically synthesized
uggcacuucgagaaggaagug

SEQ ID NO: 78551 - RNA, 21 nt, Artificial Sequence
  Chemically synthesized
agaaacacagaaugggacugg

SEQ ID NO: 78552 - RNA, 21 nt, Artificial Sequence
  Chemically synthesized
uagaaacacagaaugggacug

SEQ ID NO: 78553 - RNA, 21 nt, Artificial Sequence
  Chemically synthesized
uccuuggagaaagcugguucc

SEQ ID NO: 78554 - RNA, 21 nt, Artificial Sequence
  Chemically synthesized
uuacucuccacuuccuucucg

SEQ ID NO: 78555 - RNA, 21 nt, Artificial Sequence
  Chemically synthesized
uuuacucuccacuuccuucuc

SEQ ID NO: 78556 - RNA, 21 nt, Artificial Sequence
  Chemically synthesized
ucuuuacucuccacuuccuuc

SEQ ID NO: 78557 - RNA, 21 nt, Artificial Sequence
  Chemically synthesized
uuucaccaaccuguugcucgc

SEQ ID NO: 78558 - RNA, 21 nt, Artificial Sequence
  Chemically synthesized
ucugcagcuggauuuccaaag

SEQ ID NO: 78559 - RNA, 21 nt, Artificial Sequence
  Chemically synthesized
uucugcagcuggauuuccaaa

SEQ ID NO: 78560 - RNA, 21 nt, Artificial Sequence
  Chemically synthesized
ugucuuuacucuccacuuccu

SEQ ID NO: 78561 - RNA, 21 nt, Artificial Sequence
  Chemically synthesized
cuuuacucuccacuuccuucu

SEQ ID NO: 78562 - RNA, 21 nt, Artificial Sequence
  Chemically synthesized
uucaccaaccuguugcucgcu

SEQ ID NO: 78563 - RNA, 21 nt, Artificial Sequence
  Chemically synthesized
gucccauucuguguuucuacg

SEQ ID NO: 78564 - RNA, 21 nt, Artificial Sequence
  Chemically synthesized
uacucuccacuuccuucucga

SEQ ID NO: 78565 - RNA, 21 nt, Artificial Sequence
  Chemically synthesized
ucuggaaaacgggaaccagcu

SEQ ID NO: 78566 - RNA, 21 nt, Artificial Sequence
  Chemically synthesized
auucuguguuucuacgaucgc

SEQ ID NO: 78567 - RNA, 21 nt, Artificial Sequence
  Chemically synthesized
cauucuguguuucuacgaucg

SEQ ID NO: 78568 - RNA, 21 nt, Artificial Sequence
  Chemically synthesized
uccacuuccuucucgaagugc

SEQ ID NO: 78569 - RNA, 21 nt, Artificial Sequence
  Chemically synthesized
uuucuccaaggacacaggguu

SEQ ID NO: 78570 - RNA, 21 nt, Artificial Sequence
  Chemically synthesized
ucuguuucugcagcuggauuu

SEQ ID NO: 78571 - RNA, 21 nt, Artificial Sequence
  Chemically synthesized
uccaggcgcugucuuuacucu

SEQ ID NO: 78572 - RNA, 21 nt, Artificial Sequence
  Chemically synthesized
uggaaaacgggaaccagcuuu

SEQ ID NO: 78573 - RNA, 21 nt, Artificial Sequence
  Chemically synthesized
uguguuucuacgaucgcucca

SEQ ID NO: 78574 - RNA, 21 nt, Artificial Sequence
  Chemically synthesized
acaggguuuucaccaaccugu

SEQ ID NO: 78575 - RNA, 21 nt, Artificial Sequence
  Chemically synthesized
ccauucuguguuucuacgauc

SEQ ID NO: 78576 - RNA, 21 nt, Artificial Sequence
  Chemically synthesized
ucuccacuuccuucucgaagu

SEQ ID NO: 78577 - RNA, 21 nt, Artificial Sequence
  Chemically synthesized
gucuuuacucuccacuuccuu

SEQ ID NO: 78578 - RNA, 21 nt, Artificial Sequence
  Chemically synthesized
gcugucuuuacucuccacuuc

SEQ ID NO: 78579 - RNA, 21 nt, Artificial Sequence
  Chemically synthesized
cucuccacuuccuucucgaag

SEQ ID NO: 78580 - RNA, 21 nt, Artificial Sequence
  Chemically synthesized
cuuccuucucgaagugccaac

SEQ ID NO: 78581 - RNA, 21 nt, Artificial Sequence
  Chemically synthesized
cagcuuucuccaaggacacag

SEQ ID NO: 78582 - RNA, 21 nt, Artificial Sequence
  Chemically synthesized
accagcuuucuccaaggacac

SEQ ID NO: 78583 - RNA, 21 nt, Artificial Sequence
  Chemically synthesized
ucuccaaggacacaggguuuu

SEQ ID NO: 78584 - RNA, 21 nt, Artificial Sequence
  Chemically synthesized
uccaaggacacaggguuuuca

SEQ ID NO: 78585 - RNA, 21 nt, Artificial Sequence
  Chemically synthesized
ccaaggacacaggguuuucac

SEQ ID NO: 78586 - RNA, 21 nt, Artificial Sequence
  Chemically synthesized
aggguuuucaccaaccuguug

SEQ ID NO: 78587 - RNA, 21 nt, Artificial Sequence
  Chemically synthesized
aggcgcugucuuuacucucca

SEQ ID NO: 78588 - RNA, 21 nt, Artificial Sequence
  Chemically synthesized
ggguuuucaccaaccuguugc

SEQ ID NO: 78589 - RNA, 21 nt, Artificial Sequence
  Chemically synthesized
caaggacacaggguuuucacc

SEQ ID NO: 78590 - RNA, 21 nt, Artificial Sequence
  Chemically synthesized
aaccagcuuucuccaaggaca

SEQ ID NO: 78591 - RNA, 21 nt, Artificial Sequence
  Chemically synthesized
gcgcugucuuuacucuccacu

SEQ ID NO: 78592 - RNA, 21 nt, Artificial Sequence
  Chemically synthesized
ggaaaacgggaaccagcuuuc

SEQ ID NO: 78593 - RNA, 21 nt, Artificial Sequence
  Chemically synthesized
caggguuuucaccaaccuguu

SEQ ID NO: 78594 - RNA, 21 nt, Artificial Sequence
  Chemically synthesized
cgcugucuuuacucuccacuu

SEQ ID NO: 78595 - RNA, 21 nt, Artificial Sequence
  Chemically synthesized
cuccacuuccuucucgaagug

SEQ ID NO: 78596 - RNA, 21 nt, Artificial Sequence
  Chemically synthesized
acgggaaccagcuuucuccaa

SEQ ID NO: 78597 - RNA, 21 nt, Artificial Sequence
  Chemically synthesized
ugucuguuucugcagcuggau

SEQ ID NO: 78598 - RNA, 21 nt, Artificial Sequence
  Chemically synthesized
gugucuguuucugcagcugga

SEQ ID NO: 78599 - RNA, 21 nt, Artificial Sequence
  Chemically synthesized
gcuggauuuccaaagggcuuc

SEQ ID NO: 78600 - RNA, 21 nt, Artificial Sequence
  Chemically synthesized
guguuucuacgaucgcuccag

SEQ ID NO: 78601 - RNA, 21 nt, Artificial Sequence
  Chemically synthesized
acuuccuucucgaagugccaa

SEQ ID NO: 78602 - RNA, 21 nt, Artificial Sequence
  Chemically synthesized
ggacacaggguuuucaccaac

SEQ ID NO: 78603 - RNA, 21 nt, Artificial Sequence
  Chemically synthesized
cccagucccauucuguguuuc

SEQ ID NO: 78604 - RNA, 21 nt, Artificial Sequence
  Chemically synthesized
agcuggauuuccaaagggcuu

SEQ ID NO: 78605 - RNA, 21 nt, Artificial Sequence
  Chemically synthesized
cuggaaaacgggaaccagcuu

SEQ ID NO: 78606 - RNA, 21 nt, Artificial Sequence
  Chemically synthesized
cuuucuccaaggacacagggu

SEQ ID NO: 78607 - RNA, 21 nt, Artificial Sequence
  Chemically synthesized
cccauucuguguuucuacgau

SEQ ID NO: 78608 - RNA, 21 nt, Artificial Sequence
  Chemically synthesized
gagcuguauguaaauagcauu

SEQ ID NO: 78609 - RNA, 21 nt, Artificial Sequence
  Chemically synthesized
acucuccacuuccuucucgaa

SEQ ID NO: 78610 - RNA, 21 nt, Artificial Sequence
  Chemically synthesized
aggacacaggguuuucaccaa

SEQ ID NO: 78611 - RNA, 21 nt, Artificial Sequence
  Chemically synthesized
ccagcuuucuccaaggacaca

SEQ ID NO: 78612 - RNA, 21 nt, Artificial Sequence
  Chemically synthesized
gguuuucaccaaccuguugcu

SEQ ID NO: 78613 - RNA, 21 nt, Artificial Sequence
  Chemically synthesized
cacuuccuucucgaagugcca

SEQ ID NO: 78614 - RNA, 21 nt, Artificial Sequence
  Chemically synthesized
ccagucccauucuguguuucu

SEQ ID NO: 78615 - RNA, 21 nt, Artificial Sequence
  Chemically synthesized
cagucccauucuguguuucua

SEQ ID NO: 78616 - RNA, 21 nt, Artificial Sequence
  Chemically synthesized
ggaaccagcuuucuccaagga

SEQ ID NO: 78617 - RNA, 23 nt, Artificial Sequence
  Chemically synthesized
gagcgagcaacagguuggugaaa

SEQ ID NO: 78618 - RNA, 23 nt, Artificial Sequence
  Chemically synthesized
ggagcgagcaacagguuggugaa

SEQ ID NO: 78619 - RNA, 23 nt, Artificial Sequence
  Chemically synthesized
gaaggaaguggagaguaaagaca

SEQ ID NO: 78620 - RNA, 23 nt, Artificial Sequence
  Chemically synthesized
agaaggaaguggagaguaaagac

SEQ ID NO: 78621 - RNA, 23 nt, Artificial Sequence
  Chemically synthesized
gagaaggaaguggagaguaaaga

SEQ ID NO: 78622 - RNA, 23 nt, Artificial Sequence
  Chemically synthesized
cgagaaggaaguggagaguaaag

SEQ ID NO: 78623 - RNA, 23 nt, Artificial Sequence
  Chemically synthesized
ucgagaaggaaguggagaguaaa

SEQ ID NO: 78624 - RNA, 23 nt, Artificial Sequence
  Chemically synthesized
uucgagaaggaaguggagaguaa

SEQ ID NO: 78625 - RNA, 23 nt, Artificial Sequence
  Chemically synthesized
cgaucguagaaacacagaauggg

SEQ ID NO: 78626 - RNA, 23 nt, Artificial Sequence
  Chemically synthesized
gcgaucguagaaacacagaaugg

SEQ ID NO: 78627 - RNA, 23 nt, Artificial Sequence
  Chemically synthesized
ggaaauccagcugcagaaacaga

SEQ ID NO: 78628 - RNA, 23 nt, Artificial Sequence
  Chemically synthesized
guagaaacacagaaugggacugg

SEQ ID NO: 78629 - RNA, 23 nt, Artificial Sequence
  Chemically synthesized
cguagaaacacagaaugggacug

SEQ ID NO: 78630 - RNA, 23 nt, Artificial Sequence
  Chemically synthesized
ucguagaaacacagaaugggacu

SEQ ID NO: 78631 - RNA, 23 nt, Artificial Sequence
  Chemically synthesized
aucguagaaacacagaaugggac

SEQ ID NO: 78632 - RNA, 23 nt, Artificial Sequence
  Chemically synthesized
gaucguagaaacacagaauggga

SEQ ID NO: 78633 - RNA, 23 nt, Artificial Sequence
  Chemically synthesized
ggaaguggagaguaaagacagcg

SEQ ID NO: 78634 - RNA, 23 nt, Artificial Sequence
  Chemically synthesized
aggaaguggagaguaaagacagc

SEQ ID NO: 78635 - RNA, 23 nt, Artificial Sequence
  Chemically synthesized
aaggaaguggagaguaaagacag

SEQ ID NO: 78636 - RNA, 23 nt, Artificial Sequence
  Chemically synthesized
guuggcacuucgagaaggaagug

SEQ ID NO: 78637 - RNA, 23 nt, Artificial Sequence
  Chemically synthesized
gguuggcacuucgagaaggaagu

SEQ ID NO: 78638 - RNA, 23 nt, Artificial Sequence
  Chemically synthesized
cgguuggcacuucgagaaggaag

SEQ ID NO: 78639 - RNA, 23 nt, Artificial Sequence
  Chemically synthesized
gcgguuggcacuucgagaaggaa

SEQ ID NO: 78640 - RNA, 23 nt, Artificial Sequence
  Chemically synthesized
cgcgguuggcacuucgagaagga

SEQ ID NO: 78641 - RNA, 23 nt, Artificial Sequence
  Chemically synthesized
gaaguggagaguaaagacagcgc

SEQ ID NO: 78642 - RNA, 23 nt, Artificial Sequence
  Chemically synthesized
ucggcaggcggaacuuguaggaa

SEQ ID NO: 78643 - RNA, 23 nt, Artificial Sequence
  Chemically synthesized
aguggagaguaaagacagcgccu

SEQ ID NO: 78644 - RNA, 23 nt, Artificial Sequence
  Chemically synthesized
cuucgagaaggaaguggagagua

SEQ ID NO: 78645 - RNA, 23 nt, Artificial Sequence
  Chemically synthesized
acuucgagaaggaaguggagagu

SEQ ID NO: 78646 - RNA, 23 nt, Artificial Sequence
  Chemically synthesized
gaaagcugguucccguuuuccag

SEQ ID NO: 78647 - RNA, 23 nt, Artificial Sequence
  Chemically synthesized
agaaagcugguucccguuuucca

SEQ ID NO: 78648 - RNA, 23 nt, Artificial Sequence
  Chemically synthesized
gagaaagcugguucccguuuucc

SEQ ID NO: 78649 - RNA, 23 nt, Artificial Sequence
  Chemically synthesized
ggagaaagcugguucccguuuuc

SEQ ID NO: 78650 - RNA, 23 nt, Artificial Sequence
  Chemically synthesized
uggagaaagcugguucccguuuu

SEQ ID NO: 78651 - RNA, 23 nt, Artificial Sequence
  Chemically synthesized
ugaaaacccuguguccuuggaga

SEQ ID NO: 78652 - RNA, 23 nt, Artificial Sequence
  Chemically synthesized
uuggcacuucgagaaggaagugg

SEQ ID NO: 78653 - RNA, 23 nt, Artificial Sequence
  Chemically synthesized
ggcacuucgagaaggaaguggag

SEQ ID NO: 78654 - RNA, 23 nt, Artificial Sequence
  Chemically synthesized
uggcacuucgagaaggaagugga

SEQ ID NO: 78655 - RNA, 23 nt, Artificial Sequence
  Chemically synthesized
gaaauccagcugcagaaacagac

SEQ ID NO: 78656 - RNA, 23 nt, Artificial Sequence
  Chemically synthesized
agcugguucccguuuuccagagg

SEQ ID NO: 78657 - RNA, 23 nt, Artificial Sequence
  Chemically synthesized
aagcugguucccguuuuccagag

SEQ ID NO: 78658 - RNA, 23 nt, Artificial Sequence
  Chemically synthesized
aaagcugguucccguuuuccaga

SEQ ID NO: 78659 - RNA, 23 nt, Artificial Sequence
  Chemically synthesized
aaguggagaguaaagacagcgcc

SEQ ID NO: 78660 - RNA, 23 nt, Artificial Sequence
  Chemically synthesized
cuguguccuuggagaaagcuggu

SEQ ID NO: 78661 - RNA, 23 nt, Artificial Sequence
  Chemically synthesized
aguaaagacagcgccuggagcga

SEQ ID NO: 78662 - RNA, 23 nt, Artificial Sequence
  Chemically synthesized
gaguaaagacagcgccuggagcg

SEQ ID NO: 78663 - RNA, 23 nt, Artificial Sequence
  Chemically synthesized
uuggagaaagcugguucccguuu

SEQ ID NO: 78664 - RNA, 23 nt, Artificial Sequence
  Chemically synthesized
cuuggagaaagcugguucccguu

SEQ ID NO: 78665 - RNA, 23 nt, Artificial Sequence
  Chemically synthesized
uggugaaaacccuguguccuugg

SEQ ID NO: 78666 - RNA, 23 nt, Artificial Sequence
  Chemically synthesized
uuggugaaaacccuguguccuug

SEQ ID NO: 78667 - RNA, 23 nt, Artificial Sequence
  Chemically synthesized
guuggugaaaacccuguguccuu

SEQ ID NO: 78668 - RNA, 23 nt, Artificial Sequence
  Chemically synthesized
cacuucgagaaggaaguggagag

SEQ ID NO: 78669 - RNA, 23 nt, Artificial Sequence
  Chemically synthesized
gcacuucgagaaggaaguggaga

SEQ ID NO: 78670 - RNA, 23 nt, Artificial Sequence
  Chemically synthesized
cugguucccguuuuccagagggg

SEQ ID NO: 78671 - RNA, 23 nt, Artificial Sequence
  Chemically synthesized
gcugguucccguuuuccagaggg

SEQ ID NO: 78672 - RNA, 23 nt, Artificial Sequence
  Chemically synthesized
agaaacacagaaugggacugggg

SEQ ID NO: 78673 - RNA, 23 nt, Artificial Sequence
  Chemically synthesized
uagaaacacagaaugggacuggg

SEQ ID NO: 78674 - RNA, 23 nt, Artificial Sequence
  Chemically synthesized
gugaaaacccuguguccuuggag

SEQ ID NO: 78675 - RNA, 23 nt, Artificial Sequence
  Chemically synthesized
cagcugcagaaacagacacccca

SEQ ID NO: 78676 - RNA, 23 nt, Artificial Sequence
  Chemically synthesized
aacacagaaugggacuggggaag

SEQ ID NO: 78677 - RNA, 23 nt, Artificial Sequence
  Chemically synthesized
aaacacagaaugggacuggggaa

SEQ ID NO: 78678 - RNA, 23 nt, Artificial Sequence
  Chemically synthesized
acuggggaagcccuuuggaaauc

SEQ ID NO: 78679 - RNA, 23 nt, Artificial Sequence
  Chemically synthesized
ugguucccguuuuccagaggggg

SEQ ID NO: 78680 - RNA, 23 nt, Artificial Sequence
  Chemically synthesized
ugcuauuuacauacagcucuaua

SEQ ID NO: 78681 - RNA, 23 nt, Artificial Sequence
  Chemically synthesized
agcugcagaaacagacaccccaa

SEQ ID NO: 78682 - RNA, 23 nt, Artificial Sequence
  Chemically synthesized
uuucaccaaccuguugcucgcuc

SEQ ID NO: 78683 - RNA, 23 nt, Artificial Sequence
  Chemically synthesized
uucaccaaccuguugcucgcucc

SEQ ID NO: 78684 - RNA, 23 nt, Artificial Sequence
  Chemically synthesized
ugucuuuacucuccacuuccuuc

SEQ ID NO: 78685 - RNA, 23 nt, Artificial Sequence
  Chemically synthesized
gucuuuacucuccacuuccuucu

SEQ ID NO: 78686 - RNA, 23 nt, Artificial Sequence
  Chemically synthesized
ucuuuacucuccacuuccuucuc

SEQ ID NO: 78687 - RNA, 23 nt, Artificial Sequence
  Chemically synthesized
cuuuacucuccacuuccuucucg

SEQ ID NO: 78688 - RNA, 23 nt, Artificial Sequence
  Chemically synthesized
uuuacucuccacuuccuucucga

SEQ ID NO: 78689 - RNA, 23 nt, Artificial Sequence
  Chemically synthesized
uuacucuccacuuccuucucgaa

SEQ ID NO: 78690 - RNA, 23 nt, Artificial Sequence
  Chemically synthesized
cccauucuguguuucuacgaucg

SEQ ID NO: 78691 - RNA, 23 nt, Artificial Sequence
  Chemically synthesized
ccauucuguguuucuacgaucgc

SEQ ID NO: 78692 - RNA, 23 nt, Artificial Sequence
  Chemically synthesized
ucuguuucugcagcuggauuucc

SEQ ID NO: 78693 - RNA, 23 nt, Artificial Sequence
  Chemically synthesized
ccagucccauucuguguuucuac

SEQ ID NO: 78694 - RNA, 23 nt, Artificial Sequence
  Chemically synthesized
cagucccauucuguguuucuacg

SEQ ID NO: 78695 - RNA, 23 nt, Artificial Sequence
  Chemically synthesized
agucccauucuguguuucuacga

SEQ ID NO: 78696 - RNA, 23 nt, Artificial Sequence
  Chemically synthesized
gucccauucuguguuucuacgau

SEQ ID NO: 78697 - RNA, 23 nt, Artificial Sequence
  Chemically synthesized
ucccauucuguguuucuacgauc

SEQ ID NO: 78698 - RNA, 23 nt, Artificial Sequence
  Chemically synthesized
cgcugucuuuacucuccacuucc

SEQ ID NO: 78699 - RNA, 23 nt, Artificial Sequence
  Chemically synthesized
gcugucuuuacucuccacuuccu

SEQ ID NO: 78700 - RNA, 23 nt, Artificial Sequence
  Chemically synthesized
cugucuuuacucuccacuuccuu

SEQ ID NO: 78701 - RNA, 23 nt, Artificial Sequence
  Chemically synthesized
cacuuccuucucgaagugccaac

SEQ ID NO: 78702 - RNA, 23 nt, Artificial Sequence
  Chemically synthesized
acuuccuucucgaagugccaacc

SEQ ID NO: 78703 - RNA, 23 nt, Artificial Sequence
  Chemically synthesized
cuuccuucucgaagugccaaccg

SEQ ID NO: 78704 - RNA, 23 nt, Artificial Sequence
  Chemically synthesized
uuccuucucgaagugccaaccgc

SEQ ID NO: 78705 - RNA, 23 nt, Artificial Sequence
  Chemically synthesized
uccuucucgaagugccaaccgcg

SEQ ID NO: 78706 - RNA, 23 nt, Artificial Sequence
  Chemically synthesized
gcgcugucuuuacucuccacuuc

SEQ ID NO: 78707 - RNA, 23 nt, Artificial Sequence
  Chemically synthesized
uuccuacaaguuccgccugccga

SEQ ID NO: 78708 - RNA, 23 nt, Artificial Sequence
  Chemically synthesized
aggcgcugucuuuacucuccacu

SEQ ID NO: 78709 - RNA, 23 nt, Artificial Sequence
  Chemically synthesized
uacucuccacuuccuucucgaag

SEQ ID NO: 78710 - RNA, 23 nt, Artificial Sequence
  Chemically synthesized
acucuccacuuccuucucgaagu

SEQ ID NO: 78711 - RNA, 23 nt, Artificial Sequence
  Chemically synthesized
cuggaaaacgggaaccagcuuuc

SEQ ID NO: 78712 - RNA, 23 nt, Artificial Sequence
  Chemically synthesized
uggaaaacgggaaccagcuuucu

SEQ ID NO: 78713 - RNA, 23 nt, Artificial Sequence
  Chemically synthesized
ggaaaacgggaaccagcuuucuc

SEQ ID NO: 78714 - RNA, 23 nt, Artificial Sequence
  Chemically synthesized
gaaaacgggaaccagcuuucucc

SEQ ID NO: 78715 - RNA, 23 nt, Artificial Sequence
  Chemically synthesized
aaaacgggaaccagcuuucucca

SEQ ID NO: 78716 - RNA, 23 nt, Artificial Sequence
  Chemically synthesized
ucuccaaggacacaggguuuuca

SEQ ID NO: 78717 - RNA, 23 nt, Artificial Sequence
  Chemically synthesized
ccacuuccuucucgaagugccaa

SEQ ID NO: 78718 - RNA, 23 nt, Artificial Sequence
  Chemically synthesized
cuccacuuccuucucgaagugcc

SEQ ID NO: 78719 - RNA, 23 nt, Artificial Sequence
  Chemically synthesized
uccacuuccuucucgaagugcca

SEQ ID NO: 78720 - RNA, 23 nt, Artificial Sequence
  Chemically synthesized
gucuguuucugcagcuggauuuc

SEQ ID NO: 78721 - RNA, 23 nt, Artificial Sequence
  Chemically synthesized
ccucuggaaaacgggaaccagcu

SEQ ID NO: 78722 - RNA, 23 nt, Artificial Sequence
  Chemically synthesized
cucuggaaaacgggaaccagcuu

SEQ ID NO: 78723 - RNA, 23 nt, Artificial Sequence
  Chemically synthesized
ucuggaaaacgggaaccagcuuu

SEQ ID NO: 78724 - RNA, 23 nt, Artificial Sequence
  Chemically synthesized
ggcgcugucuuuacucuccacuu

SEQ ID NO: 78725 - RNA, 23 nt, Artificial Sequence
  Chemically synthesized
accagcuuucuccaaggacacag

SEQ ID NO: 78726 - RNA, 23 nt, Artificial Sequence
  Chemically synthesized
ucgcuccaggcgcugucuuuacu

SEQ ID NO: 78727 - RNA, 23 nt, Artificial Sequence
  Chemically synthesized
cgcuccaggcgcugucuuuacuc

SEQ ID NO: 78728 - RNA, 23 nt, Artificial Sequence
  Chemically synthesized
aaacgggaaccagcuuucuccaa

SEQ ID NO: 78729 - RNA, 23 nt, Artificial Sequence
  Chemically synthesized
aacgggaaccagcuuucuccaag

SEQ ID NO: 78730 - RNA, 23 nt, Artificial Sequence
  Chemically synthesized
ccaaggacacaggguuuucacca

SEQ ID NO: 78731 - RNA, 23 nt, Artificial Sequence
  Chemically synthesized
caaggacacaggguuuucaccaa

SEQ ID NO: 78732 - RNA, 23 nt, Artificial Sequence
  Chemically synthesized
aaggacacaggguuuucaccaac

SEQ ID NO: 78733 - RNA, 23 nt, Artificial Sequence
  Chemically synthesized
cucuccacuuccuucucgaagug

SEQ ID NO: 78734 - RNA, 23 nt, Artificial Sequence
  Chemically synthesized
ucuccacuuccuucucgaagugc

SEQ ID NO: 78735 - RNA, 23 nt, Artificial Sequence
  Chemically synthesized
ccccucuggaaaacgggaaccag

SEQ ID NO: 78736 - RNA, 23 nt, Artificial Sequence
  Chemically synthesized
cccucuggaaaacgggaaccagc

SEQ ID NO: 78737 - RNA, 23 nt, Artificial Sequence
  Chemically synthesized
ccccagucccauucuguguuucu

SEQ ID NO: 78738 - RNA, 23 nt, Artificial Sequence
  Chemically synthesized
cccagucccauucuguguuucua

SEQ ID NO: 78739 - RNA, 23 nt, Artificial Sequence
  Chemically synthesized
cuccaaggacacaggguuuucac

SEQ ID NO: 78740 - RNA, 23 nt, Artificial Sequence
  Chemically synthesized
uggggugucuguuucugcagcug

SEQ ID NO: 78741 - RNA, 23 nt, Artificial Sequence
  Chemically synthesized
cuuccccagucccauucuguguu

SEQ ID NO: 78742 - RNA, 23 nt, Artificial Sequence
  Chemically synthesized
uuccccagucccauucuguguuu

SEQ ID NO: 78743 - RNA, 23 nt, Artificial Sequence
  Chemically synthesized
gauuuccaaagggcuuccccagu

SEQ ID NO: 78744 - RNA, 23 nt, Artificial Sequence
  Chemically synthesized
cccccucuggaaaacgggaacca

SEQ ID NO: 78745 - RNA, 23 nt, Artificial Sequence
  Chemically synthesized
uauagagcuguauguaaauagca

SEQ ID NO: 78746 - RNA, 23 nt, Artificial Sequence
  Chemically synthesized
uuggggugucuguuucugcagcu

SEQ ID NO: 78747 - RNA, 19 nt, Artificial Sequence
  Chemically synthesized
caauacugacccucuuuac

SEQ ID NO: 78748 - RNA, 19 nt, Artificial Sequence
  Chemically synthesized
acacgaucgagaaacugaa

SEQ ID NO: 78749 - RNA, 19 nt, Artificial Sequence
  Chemically synthesized
ugaagaagaggaagagaaa

SEQ ID NO: 78750 - RNA, 19 nt, Artificial Sequence
  Chemically synthesized
ccauguuacuuuauucaga

SEQ ID NO: 78751 - RNA, 19 nt, Artificial Sequence
  Chemically synthesized
cauccuagugggaacuaaa

SEQ ID NO: 78752 - RNA, 19 nt, Artificial Sequence
  Chemically synthesized
caaugcauuuccuggagaa

SEQ ID NO: 78753 - RNA, 19 nt, Artificial Sequence
  Chemically synthesized
cacggguaaaaacucuaaa

SEQ ID NO: 78754 - RNA, 19 nt, Artificial Sequence
  Chemically synthesized
aaaugacaagccuucuuaa

SEQ ID NO: 78755 - RNA, 19 nt, Artificial Sequence
  Chemically synthesized
caauguuaugguagaugga

SEQ ID NO: 78756 - RNA, 19 nt, Artificial Sequence
  Chemically synthesized
ccuggagaauauaucccua

SEQ ID NO: 78757 - RNA, 19 nt, Artificial Sequence
  Chemically synthesized
uguuaugguagauggaaaa

SEQ ID NO: 78758 - RNA, 19 nt, Artificial Sequence
  Chemically synthesized
gaaagugucacggguaaaa

SEQ ID NO: 78759 - RNA, 19 nt, Artificial Sequence
  Chemically synthesized
cgagcacugaacuuugcaa

SEQ ID NO: 78760 - RNA, 19 nt, Artificial Sequence
  Chemically synthesized
acggguaaaaacucuaaaa

SEQ ID NO: 78761 - RNA, 19 nt, Artificial Sequence
  Chemically synthesized
ccauucuuguucagauuaa

SEQ ID NO: 78762 - RNA, 19 nt, Artificial Sequence
  Chemically synthesized
caaagacaguauuuugaca

SEQ ID NO: 78763 - RNA, 19 nt, Artificial Sequence
  Chemically synthesized
gagaacaccgagcacugaa

SEQ ID NO: 78764 - RNA, 19 nt, Artificial Sequence
  Chemically synthesized
auguuaugguagauggaaa

SEQ ID NO: 78765 - RNA, 19 nt, Artificial Sequence
  Chemically synthesized
cuaugaaccuucuuaacau

SEQ ID NO: 78766 - RNA, 19 nt, Artificial Sequence
  Chemically synthesized
gcuuuugcggagauuuuga

SEQ ID NO: 78767 - RNA, 19 nt, Artificial Sequence
  Chemically synthesized
aguagaugaugaaagaaag

SEQ ID NO: 78768 - RNA, 19 nt, Artificial Sequence
  Chemically synthesized
ugaucaaaggacaaagaca

SEQ ID NO: 78769 - RNA, 19 nt, Artificial Sequence
  Chemically synthesized
ccuucugaacuacacugca

SEQ ID NO: 78770 - RNA, 19 nt, Artificial Sequence
  Chemically synthesized
gauaaagacacgaucgaga

SEQ ID NO: 78771 - RNA, 19 nt, Artificial Sequence
  Chemically synthesized
gcauuuccuggagaauaua

SEQ ID NO: 78772 - RNA, 19 nt, Artificial Sequence
  Chemically synthesized
cauuguugugccgagaaca

SEQ ID NO: 78773 - RNA, 19 nt, Artificial Sequence
  Chemically synthesized
cucagaugcguaaagcaga

SEQ ID NO: 78774 - RNA, 19 nt, Artificial Sequence
  Chemically synthesized
gugcaaagugguauccuga

SEQ ID NO: 78775 - RNA, 19 nt, Artificial Sequence
  Chemically synthesized
cauguguugcagcuuuaua

SEQ ID NO: 78776 - RNA, 19 nt, Artificial Sequence
  Chemically synthesized
aauacgaaguggagauuua

SEQ ID NO: 78777 - RNA, 19 nt, Artificial Sequence
  Chemically synthesized
cuuugugauuucauagcga

SEQ ID NO: 78778 - RNA, 19 nt, Artificial Sequence
  Chemically synthesized
gcuguaaaauaccuggagu

SEQ ID NO: 78779 - RNA, 19 nt, Artificial Sequence
  Chemically synthesized
gguaaaaacucuaaaaggu

SEQ ID NO: 78780 - RNA, 19 nt, Artificial Sequence
  Chemically synthesized
uaaagacacgaucgagaaa

SEQ ID NO: 78781 - RNA, 19 nt, Artificial Sequence
  Chemically synthesized
gcuaauaagugcuuuccuu

SEQ ID NO: 78782 - RNA, 19 nt, Artificial Sequence
  Chemically synthesized
ugcuuuccauguuacuuua

SEQ ID NO: 78783 - RNA, 19 nt, Artificial Sequence
  Chemically synthesized
ccuacugaucaguuacaca

SEQ ID NO: 78784 - RNA, 19 nt, Artificial Sequence
  Chemically synthesized
ucacggguaaaaacucuaa

SEQ ID NO: 78785 - RNA, 19 nt, Artificial Sequence
  Chemically synthesized
gaaugaaagugucacgggu

SEQ ID NO: 78786 - RNA, 19 nt, Artificial Sequence
  Chemically synthesized
aaaugccugcuguuguaaa

SEQ ID NO: 78787 - RNA, 19 nt, Artificial Sequence
  Chemically synthesized
gccucaagacaguguuuga

SEQ ID NO: 78788 - RNA, 19 nt, Artificial Sequence
  Chemically synthesized
cgugcaaagugguauccug

SEQ ID NO: 78789 - RNA, 19 nt, Artificial Sequence
  Chemically synthesized
agcuggacaagaagauuau

SEQ ID NO: 78790 - RNA, 19 nt, Artificial Sequence
  Chemically synthesized
uaguaaaagugcuuuccau

SEQ ID NO: 78791 - RNA, 19 nt, Artificial Sequence
  Chemically synthesized
aaagugucacggguaaaaa

SEQ ID NO: 78792 - RNA, 19 nt, Artificial Sequence
  Chemically synthesized
ugaaagugucacggguaaa

SEQ ID NO: 78793 - RNA, 19 nt, Artificial Sequence
  Chemically synthesized
gaacagccucccgaaugaa

SEQ ID NO: 78794 - RNA, 19 nt, Artificial Sequence
  Chemically synthesized
uguaguucucagaugcgua

SEQ ID NO: 78795 - RNA, 19 nt, Artificial Sequence
  Chemically synthesized
guaagaguucagacucaca

SEQ ID NO: 78796 - RNA, 19 nt, Artificial Sequence
  Chemically synthesized
cgugaagaagaggaagaga

SEQ ID NO: 78797 - RNA, 19 nt, Artificial Sequence
  Chemically synthesized
gaaucugggcuuaugggau

SEQ ID NO: 78798 - RNA, 19 nt, Artificial Sequence
  Chemically synthesized
guuacuuuauucagagcua

SEQ ID NO: 78799 - RNA, 19 nt, Artificial Sequence
  Chemically synthesized
aaaagugcuuuccauguua

SEQ ID NO: 78800 - RNA, 19 nt, Artificial Sequence
  Chemically synthesized
gacaaagacaguauuuuga

SEQ ID NO: 78801 - RNA, 19 nt, Artificial Sequence
  Chemically synthesized
caaaggacaaagacaguau

SEQ ID NO: 78802 - RNA, 19 nt, Artificial Sequence
  Chemically synthesized
ccaacuuuuuguuacagau

SEQ ID NO: 78803 - RNA, 19 nt, Artificial Sequence
  Chemically synthesized
cacucaaugccaacuuuuu

SEQ ID NO: 78804 - RNA, 19 nt, Artificial Sequence
  Chemically synthesized
gacacgaucgagaaacuga

SEQ ID NO: 78805 - RNA, 19 nt, Artificial Sequence
  Chemically synthesized
uagugggaacuaaacuuga

SEQ ID NO: 78806 - RNA, 19 nt, Artificial Sequence
  Chemically synthesized
cuuaguaagugcuuuucuu

SEQ ID NO: 78807 - RNA, 19 nt, Artificial Sequence
  Chemically synthesized
aguggagauuuacacuaca

SEQ ID NO: 78808 - RNA, 19 nt, Artificial Sequence
  Chemically synthesized
acguguucccgacauaaca

SEQ ID NO: 78809 - RNA, 19 nt, Artificial Sequence
  Chemically synthesized
aaugacaagccuucuuaaa

SEQ ID NO: 78810 - RNA, 19 nt, Artificial Sequence
  Chemically synthesized
gugaagaagaggaagagaa

SEQ ID NO: 78811 - RNA, 19 nt, Artificial Sequence
  Chemically synthesized
auaaagacacgaucgagaa

SEQ ID NO: 78812 - RNA, 19 nt, Artificial Sequence
  Chemically synthesized
cggugaaucugggcuuaug

SEQ ID NO: 78813 - RNA, 19 nt, Artificial Sequence
  Chemically synthesized
caguuaggaggugcagaca

SEQ ID NO: 78814 - RNA, 19 nt, Artificial Sequence
  Chemically synthesized
ugucaaaugcaguagauga

SEQ ID NO: 78815 - RNA, 19 nt, Artificial Sequence
  Chemically synthesized
caaaauacgaaguggagau

SEQ ID NO: 78816 - RNA, 19 nt, Artificial Sequence
  Chemically synthesized
ugacaaaauacgaagugga

SEQ ID NO: 78817 - RNA, 19 nt, Artificial Sequence
  Chemically synthesized
ggacaaagacaguauuuug

SEQ ID NO: 78818 - RNA, 19 nt, Artificial Sequence
  Chemically synthesized
gauuggugcuguaaaauac

SEQ ID NO: 78819 - RNA, 19 nt, Artificial Sequence
  Chemically synthesized
caacacucccaucauccua

SEQ ID NO: 78820 - RNA, 19 nt, Artificial Sequence
  Chemically synthesized
cuuaugggauacagcugga

SEQ ID NO: 78821 - RNA, 19 nt, Artificial Sequence
  Chemically synthesized
cugccaauguuaugguaga

SEQ ID NO: 78822 - RNA, 19 nt, Artificial Sequence
  Chemically synthesized
caauuauucugccaauguu

SEQ ID NO: 78823 - RNA, 19 nt, Artificial Sequence
  Chemically synthesized
ugaucaguuacacaaccaa

SEQ ID NO: 78824 - RNA, 19 nt, Artificial Sequence
  Chemically synthesized
aaugcaguagaugaugaaa

SEQ ID NO: 78825 - RNA, 19 nt, Artificial Sequence
  Chemically synthesized
ugugaucaaaggacaaaga

SEQ ID NO: 78826 - RNA, 19 nt, Artificial Sequence
  Chemically synthesized
cauuguacuguaauggagu

SEQ ID NO: 78827 - RNA, 19 nt, Artificial Sequence
  Chemically synthesized
cccgugaagaagaggaaga

SEQ ID NO: 78828 - RNA, 19 nt, Artificial Sequence
  Chemically synthesized
augggauacagcuggacaa

SEQ ID NO: 78829 - RNA, 19 nt, Artificial Sequence
  Chemically synthesized
ugcauuuccuggagaauau

SEQ ID NO: 78830 - RNA, 19 nt, Artificial Sequence
  Chemically synthesized
guugcagcuuuauaguuuu

SEQ ID NO: 78831 - RNA, 19 nt, Artificial Sequence
  Chemically synthesized
uaugccuccuuguauuaua

SEQ ID NO: 78832 - RNA, 19 nt, Artificial Sequence
  Chemically synthesized
aaugaagcguugccauuga

SEQ ID NO: 78833 - RNA, 19 nt, Artificial Sequence
  Chemically synthesized
agaacagccucccgaauga

SEQ ID NO: 78834 - RNA, 19 nt, Artificial Sequence
  Chemically synthesized
gacgguagcuucugcaguu

SEQ ID NO: 78835 - RNA, 19 nt, Artificial Sequence
  Chemically synthesized
agaggaagagaaaaugccu

SEQ ID NO: 78836 - RNA, 19 nt, Artificial Sequence
  Chemically synthesized
cuacugucuuugacaauua

SEQ ID NO: 78837 - RNA, 19 nt, Artificial Sequence
  Chemically synthesized
gucacggguaaaaacucua

SEQ ID NO: 78838 - RNA, 19 nt, Artificial Sequence
  Chemically synthesized
guggagauuuacacuacau

SEQ ID NO: 78839 - RNA, 19 nt, Artificial Sequence
  Chemically synthesized
cuuagggaugauaaagaca

SEQ ID NO: 78840 - RNA, 19 nt, Artificial Sequence
  Chemically synthesized
uugaaaauguccgugcaaa

SEQ ID NO: 78841 - RNA, 19 nt, Artificial Sequence
  Chemically synthesized
gggauacagcuggacaaga

SEQ ID NO: 78842 - RNA, 19 nt, Artificial Sequence
  Chemically synthesized
acaguugcagaauugugga

SEQ ID NO: 78843 - RNA, 19 nt, Artificial Sequence
  Chemically synthesized
agucgcuuugccuauugau

SEQ ID NO: 78844 - RNA, 19 nt, Artificial Sequence
  Chemically synthesized
agaagguuuuuuugucgau

SEQ ID NO: 78845 - RNA, 19 nt, Artificial Sequence
  Chemically synthesized
ucuguuagucgcuaacuua

SEQ ID NO: 78846 - RNA, 19 nt, Artificial Sequence
  Chemically synthesized
ggguaaaaacucuaaaagg

SEQ ID NO: 78847 - RNA, 19 nt, Artificial Sequence
  Chemically synthesized
gaagcguugccauugaacu

SEQ ID NO: 78848 - RNA, 19 nt, Artificial Sequence
  Chemically synthesized
gccaacuuuuuguuacaga

SEQ ID NO: 78849 - RNA, 19 nt, Artificial Sequence
  Chemically synthesized
aaugccugcuguuguaaau

SEQ ID NO: 78850 - RNA, 19 nt, Artificial Sequence
  Chemically synthesized
cucccgugaagaagaggaa

SEQ ID NO: 78851 - RNA, 19 nt, Artificial Sequence
  Chemically synthesized
aaucugggcuuaugggaua

SEQ ID NO: 78852 - RNA, 19 nt, Artificial Sequence
  Chemically synthesized
gguuguucuguuagucgcu

SEQ ID NO: 78853 - RNA, 19 nt, Artificial Sequence
  Chemically synthesized
acaaggaaugaaaguguca

SEQ ID NO: 78854 - RNA, 19 nt, Artificial Sequence
  Chemically synthesized
ugugugugaucaaaggaca

SEQ ID NO: 78855 - RNA, 19 nt, Artificial Sequence
  Chemically synthesized
gucccaacacucccaucau

SEQ ID NO: 78856 - RNA, 19 nt, Artificial Sequence
  Chemically synthesized
ugaaaauguccgugcaaag

SEQ ID NO: 78857 - RNA, 19 nt, Artificial Sequence
  Chemically synthesized
gaucaguuacacaaccaau

SEQ ID NO: 78858 - RNA, 19 nt, Artificial Sequence
  Chemically synthesized
ggagauuuacacuacauug

SEQ ID NO: 78859 - RNA, 19 nt, Artificial Sequence
  Chemically synthesized
aaaggacaaagacaguauu

SEQ ID NO: 78860 - RNA, 19 nt, Artificial Sequence
  Chemically synthesized
agcugacucccaucaccua

SEQ ID NO: 78861 - RNA, 19 nt, Artificial Sequence
  Chemically synthesized
ccaacacucccaucauccu

SEQ ID NO: 78862 - RNA, 19 nt, Artificial Sequence
  Chemically synthesized
cggguaaaaacucuaaaag

SEQ ID NO: 78863 - RNA, 19 nt, Artificial Sequence
  Chemically synthesized
ggugugugugaucaaagga

SEQ ID NO: 78864 - RNA, 19 nt, Artificial Sequence
  Chemically synthesized
gugaguuagcagcacgugu

SEQ ID NO: 78865 - RNA, 19 nt, Artificial Sequence
  Chemically synthesized
cuaaauguaagaguucaga

SEQ ID NO: 78866 - RNA, 19 nt, Artificial Sequence
  Chemically synthesized
gaaggagaagaagcugacu

SEQ ID NO: 78867 - RNA, 19 nt, Artificial Sequence
  Chemically synthesized
auuugaaaauguccgugca

SEQ ID NO: 78868 - RNA, 19 nt, Artificial Sequence
  Chemically synthesized
accggugaaucugggcuua

SEQ ID NO: 78869 - RNA, 19 nt, Artificial Sequence
  Chemically synthesized
guuagucgcuaacuuagua

SEQ ID NO: 78870 - RNA, 19 nt, Artificial Sequence
  Chemically synthesized
agaaagguugguauuauca

SEQ ID NO: 78871 - RNA, 19 nt, Artificial Sequence
  Chemically synthesized
uggagauuuacacuacauu

SEQ ID NO: 78872 - RNA, 19 nt, Artificial Sequence
  Chemically synthesized
uacgaaguggagauuuaca

SEQ ID NO: 78873 - RNA, 19 nt, Artificial Sequence
  Chemically synthesized
gacaaaauacgaaguggag

SEQ ID NO: 78874 - RNA, 19 nt, Artificial Sequence
  Chemically synthesized
agcucagcucuuuggauca

SEQ ID NO: 78875 - RNA, 19 nt, Artificial Sequence
  Chemically synthesized
ggugcuguaaaauaccugg

SEQ ID NO: 78876 - RNA, 19 nt, Artificial Sequence
  Chemically synthesized
ccggugaaucugggcuuau

SEQ ID NO: 78877 - RNA, 19 nt, Artificial Sequence
  Chemically synthesized
guuuugcauguaugacuua

SEQ ID NO: 78878 - RNA, 19 nt, Artificial Sequence
  Chemically synthesized
aauugacaguugcagaauu

SEQ ID NO: 78879 - RNA, 19 nt, Artificial Sequence
  Chemically synthesized
uagucgcuuugccuauuga

SEQ ID NO: 78880 - RNA, 19 nt, Artificial Sequence
  Chemically synthesized
gucacuugaccaauacuga

SEQ ID NO: 78881 - RNA, 19 nt, Artificial Sequence
  Chemically synthesized
gaagguuuuuuugucgauu

SEQ ID NO: 78882 - RNA, 19 nt, Artificial Sequence
  Chemically synthesized
uuguucuguuagucgcuaa

SEQ ID NO: 78883 - RNA, 19 nt, Artificial Sequence
  Chemically synthesized
gaaagguugguauuaucag

SEQ ID NO: 78884 - RNA, 19 nt, Artificial Sequence
  Chemically synthesized
augaaagugucacggguaa

SEQ ID NO: 78885 - RNA, 19 nt, Artificial Sequence
  Chemically synthesized
cgaaguggagauuuacacu

SEQ ID NO: 78886 - RNA, 19 nt, Artificial Sequence
  Chemically synthesized
acaaaauacgaaguggaga

SEQ ID NO: 78887 - RNA, 19 nt, Artificial Sequence
  Chemically synthesized
gaucaaaggacaaagacag

SEQ ID NO: 78888 - RNA, 19 nt, Artificial Sequence
  Chemically synthesized
guagcuucugcaguuagga

SEQ ID NO: 78889 - RNA, 19 nt, Artificial Sequence
  Chemically synthesized
ggccauuuccuguuucucu

SEQ ID NO: 78890 - RNA, 19 nt, Artificial Sequence
  Chemically synthesized
gaagauuaugacagauuac

SEQ ID NO: 78891 - RNA, 19 nt, Artificial Sequence
  Chemically synthesized
gauacagcuggacaagaag

SEQ ID NO: 78892 - RNA, 19 nt, Artificial Sequence
  Chemically synthesized
uuaaauugacaguugcaga

SEQ ID NO: 78893 - RNA, 19 nt, Artificial Sequence
  Chemically synthesized
cuuaaacuaugaaccuucu

SEQ ID NO: 78894 - RNA, 19 nt, Artificial Sequence
  Chemically synthesized
gguuaauuucugucaaaug

SEQ ID NO: 78895 - RNA, 19 nt, Artificial Sequence
  Chemically synthesized
gauuuacacuacauuguac

SEQ ID NO: 78896 - RNA, 19 nt, Artificial Sequence
  Chemically synthesized
ccugcuguuguaaaugucu

SEQ ID NO: 78897 - RNA, 19 nt, Artificial Sequence
  Chemically synthesized
aagacacgaucgagaaacu

SEQ ID NO: 78898 - RNA, 19 nt, Artificial Sequence
  Chemically synthesized
uuugaaaauguccgugcaa

SEQ ID NO: 78899 - RNA, 19 nt, Artificial Sequence
  Chemically synthesized
gaucuuuugcuaaugcaau

SEQ ID NO: 78900 - RNA, 19 nt, Artificial Sequence
  Chemically synthesized
guuacacaaccaaugcauu

SEQ ID NO: 78901 - RNA, 19 nt, Artificial Sequence
  Chemically synthesized
aagugucacggguaaaaac

SEQ ID NO: 78902 - RNA, 19 nt, Artificial Sequence
  Chemically synthesized
uuuggaucagucuuuguga

SEQ ID NO: 78903 - RNA, 19 nt, Artificial Sequence
  Chemically synthesized
uaauggagugagcguagca

SEQ ID NO: 78904 - RNA, 19 nt, Artificial Sequence
  Chemically synthesized
gcuucugcaguuaggaggu

SEQ ID NO: 78905 - RNA, 19 nt, Artificial Sequence
  Chemically synthesized
gguagcuucugcaguuagg

SEQ ID NO: 78906 - RNA, 19 nt, Artificial Sequence
  Chemically synthesized
acgguagcuucugcaguua

SEQ ID NO: 78907 - RNA, 19 nt, Artificial Sequence
  Chemically synthesized
caccgagcacugaacuuug

SEQ ID NO: 78908 - RNA, 19 nt, Artificial Sequence
  Chemically synthesized
cacgaucgagaaacugaag

SEQ ID NO: 78909 - RNA, 19 nt, Artificial Sequence
  Chemically synthesized
ggugaaucugggcuuaugg

SEQ ID NO: 78910 - RNA, 19 nt, Artificial Sequence
  Chemically synthesized
gcugacgauguucuguaca

SEQ ID NO: 78911 - RNA, 19 nt, Artificial Sequence
  Chemically synthesized
cuaauaagugcuuuccuua

SEQ ID NO: 78912 - RNA, 19 nt, Artificial Sequence
  Chemically synthesized
cauguuacuuuauucagag

SEQ ID NO: 78913 - RNA, 19 nt, Artificial Sequence
  Chemically synthesized
gguuuuuuugucgauuagu

SEQ ID NO: 78914 - RNA, 19 nt, Artificial Sequence
  Chemically synthesized
gcauuagaagguuuuuuug

SEQ ID NO: 78915 - RNA, 19 nt, Artificial Sequence
  Chemically synthesized
aaaacuugccuacugauca

SEQ ID NO: 78916 - RNA, 19 nt, Artificial Sequence
  Chemically synthesized
agaugcguaaagcagaaca

SEQ ID NO: 78917 - RNA, 19 nt, Artificial Sequence
  Chemically synthesized
cgguagcuucugcaguuag

SEQ ID NO: 78918 - RNA, 19 nt, Artificial Sequence
  Chemically synthesized
aagaguucagacucacauu

SEQ ID NO: 78919 - RNA, 19 nt, Artificial Sequence
  Chemically synthesized
aaggagauuggugcuguaa

SEQ ID NO: 78920 - RNA, 19 nt, Artificial Sequence
  Chemically synthesized
ggaugauaaagacacgauc

SEQ ID NO: 78921 - RNA, 19 nt, Artificial Sequence
  Chemically synthesized
uugaucuuagggaugauaa

SEQ ID NO: 78922 - RNA, 19 nt, Artificial Sequence
  Chemically synthesized
cuggacaagaagauuauga

SEQ ID NO: 78923 - RNA, 19 nt, Artificial Sequence
  Chemically synthesized
gggcuuaugggauacagcu

SEQ ID NO: 78924 - RNA, 19 nt, Artificial Sequence
  Chemically synthesized
aauguuaugguagauggaa

SEQ ID NO: 78925 - RNA, 19 nt, Artificial Sequence
  Chemically synthesized
gugugaucaaaggacaaag

SEQ ID NO: 78926 - RNA, 19 nt, Artificial Sequence
  Chemically synthesized
agaaaaugccugcuguugu

SEQ ID NO: 78927 - RNA, 19 nt, Artificial Sequence
  Chemically synthesized
cauggcuaaggagauuggu

SEQ ID NO: 78928 - RNA, 19 nt, Artificial Sequence
  Chemically synthesized
agggaugauaaagacacga

SEQ ID NO: 78929 - RNA, 19 nt, Artificial Sequence
  Chemically synthesized
ugaaucugggcuuauggga

SEQ ID NO: 78930 - RNA, 19 nt, Artificial Sequence
  Chemically synthesized
auuguggaguguuuuuaca

SEQ ID NO: 78931 - RNA, 19 nt, Artificial Sequence
  Chemically synthesized
cauuuccuggagaauauau

SEQ ID NO: 78932 - RNA, 19 nt, Artificial Sequence
  Chemically synthesized
uguuccuuugggucuguga

SEQ ID NO: 78933 - RNA, 19 nt, Artificial Sequence
  Chemically synthesized
ugaccaauacugacccucu

SEQ ID NO: 78934 - RNA, 19 nt, Artificial Sequence
  Chemically synthesized
aagcuuuuccuuucucuua

SEQ ID NO: 78935 - RNA, 19 nt, Artificial Sequence
  Chemically synthesized
ccgagcacugaacuuugca

SEQ ID NO: 78936 - RNA, 19 nt, Artificial Sequence
  Chemically synthesized
gcggccauuuccuguuucu

SEQ ID NO: 78937 - RNA, 19 nt, Artificial Sequence
  Chemically synthesized
ggaaaaccggugaaucugg

SEQ ID NO: 78938 - RNA, 19 nt, Artificial Sequence
  Chemically synthesized
cuugaccaauacugacccu

SEQ ID NO: 78939 - RNA, 19 nt, Artificial Sequence
  Chemically synthesized
cagauuaccgacacuguca

SEQ ID NO: 78940 - RNA, 19 nt, Artificial Sequence
  Chemically synthesized
agguuuuuuugucgauuag

SEQ ID NO: 78941 - RNA, 19 nt, Artificial Sequence
  Chemically synthesized
gauaaugcauuagaagguu

SEQ ID NO: 78942 - RNA, 19 nt, Artificial Sequence
  Chemically synthesized
gagcaauaugccuccuugu

SEQ ID NO: 78943 - RNA, 19 nt, Artificial Sequence
  Chemically synthesized
aacugguuguucuguuagu

SEQ ID NO: 78944 - RNA, 19 nt, Artificial Sequence
  Chemically synthesized
uaaacugguuguucuguua

SEQ ID NO: 78945 - RNA, 19 nt, Artificial Sequence
  Chemically synthesized
cuauuuccucuaaugaaga

SEQ ID NO: 78946 - RNA, 19 nt, Artificial Sequence
  Chemically synthesized
aacauuguacuguaaugga

SEQ ID NO: 78947 - RNA, 19 nt, Artificial Sequence
  Chemically synthesized
aaauaccuucugaacuaca

SEQ ID NO: 78948 - RNA, 19 nt, Artificial Sequence
  Chemically synthesized
cauucuuguucagauuaag

SEQ ID NO: 78949 - RNA, 19 nt, Artificial Sequence
  Chemically synthesized
caaugccaacuuuuuguua

SEQ ID NO: 78950 - RNA, 19 nt, Artificial Sequence
  Chemically synthesized
gaggccucaagacaguguu

SEQ ID NO: 78951 - RNA, 19 nt, Artificial Sequence
  Chemically synthesized
uaccgacacugucacuuga

SEQ ID NO: 78952 - RNA, 19 nt, Artificial Sequence
  Chemically synthesized
gcuuuccauguuacuuuau

SEQ ID NO: 78953 - RNA, 19 nt, Artificial Sequence
  Chemically synthesized
cuaacuuaguaagugcuuu

SEQ ID NO: 78954 - RNA, 19 nt, Artificial Sequence
  Chemically synthesized
guuaggaggugcagacacu

SEQ ID NO: 78955 - RNA, 19 nt, Artificial Sequence
  Chemically synthesized
cccauucuuguucagauua

SEQ ID NO: 78956 - RNA, 19 nt, Artificial Sequence
  Chemically synthesized
ccgugaagaagaggaagag

SEQ ID NO: 78957 - RNA, 19 nt, Artificial Sequence
  Chemically synthesized
gaaaauguccgugcaaagu

SEQ ID NO: 78958 - RNA, 19 nt, Artificial Sequence
  Chemically synthesized
gcuggacaagaagauuaug

SEQ ID NO: 78959 - RNA, 19 nt, Artificial Sequence
  Chemically synthesized
gguagauggaaaaccggug

SEQ ID NO: 78960 - RNA, 19 nt, Artificial Sequence
  Chemically synthesized
ccaaugcauuuccuggaga

SEQ ID NO: 78961 - RNA, 19 nt, Artificial Sequence
  Chemically synthesized
uguguugcagcuuuauagu

SEQ ID NO: 78962 - RNA, 19 nt, Artificial Sequence
  Chemically synthesized
guuguucuguuagucgcua

SEQ ID NO: 78963 - RNA, 19 nt, Artificial Sequence
  Chemically synthesized
aagaaagguugguauuauc

SEQ ID NO: 78964 - RNA, 19 nt, Artificial Sequence
  Chemically synthesized
gagauuuacacuacauugu

SEQ ID NO: 78965 - RNA, 19 nt, Artificial Sequence
  Chemically synthesized
agcuguagguaaaacuugc

SEQ ID NO: 78966 - RNA, 19 nt, Artificial Sequence
  Chemically synthesized
uuuugaacagaacugcuau

SEQ ID NO: 78967 - RNA, 19 nt, Artificial Sequence
  Chemically synthesized
uaguucucagaugcguaaa

SEQ ID NO: 78968 - RNA, 19 nt, Artificial Sequence
  Chemically synthesized
gaagacgguagcuucugca

SEQ ID NO: 78969 - RNA, 19 nt, Artificial Sequence
  Chemically synthesized
aggccucaagacaguguuu

SEQ ID NO: 78970 - RNA, 19 nt, Artificial Sequence
  Chemically synthesized
gagaagaagcugacuccca

SEQ ID NO: 78971 - RNA, 19 nt, Artificial Sequence
  Chemically synthesized
cugaaggagaagaagcuga

SEQ ID NO: 78972 - RNA, 19 nt, Artificial Sequence
  Chemically synthesized
caaagugguauccugaggu

SEQ ID NO: 78973 - RNA, 19 nt, Artificial Sequence
  Chemically synthesized
auguccgugcaaaguggua

SEQ ID NO: 78974 - RNA, 19 nt, Artificial Sequence
  Chemically synthesized
uugugaguccugcaucauu

SEQ ID NO: 78975 - RNA, 19 nt, Artificial Sequence
  Chemically synthesized
auuugcuuuucccuuguga

SEQ ID NO: 78976 - RNA, 19 nt, Artificial Sequence
  Chemically synthesized
guaagugcuuuucuuauag

SEQ ID NO: 78977 - RNA, 19 nt, Artificial Sequence
  Chemically synthesized
cuguuagucgcuaacuuag

SEQ ID NO: 78978 - RNA, 19 nt, Artificial Sequence
  Chemically synthesized
cuuucucuuacaccugcca

SEQ ID NO: 78979 - RNA, 19 nt, Artificial Sequence
  Chemically synthesized
gagcggccauuuccuguuu

SEQ ID NO: 78980 - RNA, 19 nt, Artificial Sequence
  Chemically synthesized
gaaguggagauuuacacua

SEQ ID NO: 78981 - RNA, 19 nt, Artificial Sequence
  Chemically synthesized
gcguaaagcagaacagccu

SEQ ID NO: 78982 - RNA, 19 nt, Artificial Sequence
  Chemically synthesized
gaugcguaaagcagaacag

SEQ ID NO: 78983 - RNA, 19 nt, Artificial Sequence
  Chemically synthesized
gaacaccgagcacugaacu

SEQ ID NO: 78984 - RNA, 19 nt, Artificial Sequence
  Chemically synthesized
agaacaccgagcacugaac

SEQ ID NO: 78985 - RNA, 19 nt, Artificial Sequence
  Chemically synthesized
gccauuuccuguuucucug

SEQ ID NO: 78986 - RNA, 19 nt, Artificial Sequence
  Chemically synthesized
aagagaaaaugccugcugu

SEQ ID NO: 78987 - RNA, 19 nt, Artificial Sequence
  Chemically synthesized
ucuuagggaugauaaagac

SEQ ID NO: 78988 - RNA, 19 nt, Artificial Sequence
  Chemically synthesized
aucuuagggaugauaaaga

SEQ ID NO: 78989 - RNA, 19 nt, Artificial Sequence
  Chemically synthesized
gcaguuuuccucagcuuug

SEQ ID NO: 78990 - RNA, 19 nt, Artificial Sequence
  Chemically synthesized
uggacaagaagauuaugac

SEQ ID NO: 78991 - RNA, 19 nt, Artificial Sequence
  Chemically synthesized
cccuacugucuuugacaau

SEQ ID NO: 78992 - RNA, 19 nt, Artificial Sequence
  Chemically synthesized
ucccuacugucuuugacaa

SEQ ID NO: 78993 - RNA, 19 nt, Artificial Sequence
  Chemically synthesized
ugagguucuguaaacugug

SEQ ID NO: 78994 - RNA, 19 nt, Artificial Sequence
  Chemically synthesized
cacugucuugccagauuac

SEQ ID NO: 78995 - RNA, 19 nt, Artificial Sequence
  Chemically synthesized
caguuacacaaccaaugca

SEQ ID NO: 78996 - RNA, 19 nt, Artificial Sequence
  Chemically synthesized
aagugcuuuccauguuacu

SEQ ID NO: 78997 - RNA, 19 nt, Artificial Sequence
  Chemically synthesized
gcuaacuuaguaagugcuu

SEQ ID NO: 78998 - RNA, 19 nt, Artificial Sequence
  Chemically synthesized
cauugaacucaccagugag

SEQ ID NO: 78999 - RNA, 19 nt, Artificial Sequence
  Chemically synthesized
cuugcucuccuauguaguu

SEQ ID NO: 79000 - RNA, 19 nt, Artificial Sequence
  Chemically synthesized
aagaguugccaaaauaccu

SEQ ID NO: 79001 - RNA, 19 nt, Artificial Sequence
  Chemically synthesized
aaauguaagaguucagacu

SEQ ID NO: 79002 - RNA, 19 nt, Artificial Sequence
  Chemically synthesized
guuugacgaagcgauccga

SEQ ID NO: 79003 - RNA, 19 nt, Artificial Sequence
  Chemically synthesized
augauaaagacacgaucga

SEQ ID NO: 79004 - RNA, 19 nt, Artificial Sequence
  Chemically synthesized
cuucagccacuacaacaga

SEQ ID NO: 79005 - RNA, 19 nt, Artificial Sequence
  Chemically synthesized
cuuaacucacuggcgagaa

SEQ ID NO: 79006 - RNA, 19 nt, Artificial Sequence
  Chemically synthesized
uacugacccucuuuaccuc

SEQ ID NO: 79007 - RNA, 19 nt, Artificial Sequence
  Chemically synthesized
cugucacuugaccaauacu

SEQ ID NO: 79008 - RNA, 19 nt, Artificial Sequence
  Chemically synthesized
cagagcuaauaagugcuuu

SEQ ID NO: 79009 - RNA, 19 nt, Artificial Sequence
  Chemically synthesized
aaagguugguauuaucagg

SEQ ID NO: 79010 - RNA, 19 nt, Artificial Sequence
  Chemically synthesized
gaugaugaaagaaagguug

SEQ ID NO: 79011 - RNA, 19 nt, Artificial Sequence
  Chemically synthesized
aggacaaagacaguauuuu

SEQ ID NO: 79012 - RNA, 19 nt, Artificial Sequence
  Chemically synthesized
gucccuuggaaccuuugua

SEQ ID NO: 79013 - RNA, 19 nt, Artificial Sequence
  Chemically synthesized
cuguaaaauaccuggagug

SEQ ID NO: 79014 - RNA, 19 nt, Artificial Sequence
  Chemically synthesized
uagggaugauaaagacacg

SEQ ID NO: 79015 - RNA, 19 nt, Artificial Sequence
  Chemically synthesized
aaauguccgugcaaagugg

SEQ ID NO: 79016 - RNA, 19 nt, Artificial Sequence
  Chemically synthesized
ccugcaucauuugaaaaug

SEQ ID NO: 79017 - RNA, 19 nt, Artificial Sequence
  Chemically synthesized
cugggcuuaugggauacag

SEQ ID NO: 79018 - RNA, 19 nt, Artificial Sequence
  Chemically synthesized
uccuguagucgcuuugccu

SEQ ID NO: 79019 - RNA, 19 nt, Artificial Sequence
  Chemically synthesized
uguugcagcuuuauaguuu

SEQ ID NO: 79020 - RNA, 19 nt, Artificial Sequence
  Chemically synthesized
guaaaagugcuuuccaugu

SEQ ID NO: 79021 - RNA, 19 nt, Artificial Sequence
  Chemically synthesized
aauaugccuccuuguauua

SEQ ID NO: 79022 - RNA, 19 nt, Artificial Sequence
  Chemically synthesized
agucgcuaacuuaguaagu

SEQ ID NO: 79023 - RNA, 19 nt, Artificial Sequence
  Chemically synthesized
aaacuugccuacugaucag

SEQ ID NO: 79024 - RNA, 19 nt, Artificial Sequence
  Chemically synthesized
auuucugucaaaugcagua

SEQ ID NO: 79025 - RNA, 19 nt, Artificial Sequence
  Chemically synthesized
ugucacggguaaaaacucu

SEQ ID NO: 79026 - RNA, 19 nt, Artificial Sequence
  Chemically synthesized
cagcucuuuggaucagucu

SEQ ID NO: 79027 - RNA, 19 nt, Artificial Sequence
  Chemically synthesized
gaguuagcagcacguguuc

SEQ ID NO: 79028 - RNA, 19 nt, Artificial Sequence
  Chemically synthesized
ucuccuauguaguucucag

SEQ ID NO: 79029 - RNA, 19 nt, Artificial Sequence
  Chemically synthesized
acuugcucuccuauguagu

SEQ ID NO: 79030 - RNA, 19 nt, Artificial Sequence
  Chemically synthesized
cuaaaaugacaagccuucu

SEQ ID NO: 79031 - RNA, 19 nt, Artificial Sequence
  Chemically synthesized
gcacucaaugccaacuuuu

SEQ ID NO: 79032 - RNA, 19 nt, Artificial Sequence
  Chemically synthesized
aaaaugccugcuguuguaa

SEQ ID NO: 79033 - RNA, 19 nt, Artificial Sequence
  Chemically synthesized
gaagaagcugacucccauc

SEQ ID NO: 79034 - RNA, 19 nt, Artificial Sequence
  Chemically synthesized
ugaguccugcaucauuuga

SEQ ID NO: 79035 - RNA, 19 nt, Artificial Sequence
  Chemically synthesized
gacaguugcagaauugugg

SEQ ID NO: 79036 - RNA, 19 nt, Artificial Sequence
  Chemically synthesized
ugucuugccagauuaccga

SEQ ID NO: 79037 - RNA, 19 nt, Artificial Sequence
  Chemically synthesized
aaucauguguugcagcuuu

SEQ ID NO: 79038 - RNA, 19 nt, Artificial Sequence
  Chemically synthesized
gugcuuuccauguuacuuu

SEQ ID NO: 79039 - RNA, 19 nt, Artificial Sequence
  Chemically synthesized
uagaagguuuuuuugucga

SEQ ID NO: 79040 - RNA, 19 nt, Artificial Sequence
  Chemically synthesized
ucugauaaugcauuagaag

SEQ ID NO: 79041 - RNA, 19 nt, Artificial Sequence
  Chemically synthesized
uaagcuuuuccuuucucuu

SEQ ID NO: 79042 - RNA, 19 nt, Artificial Sequence
  Chemically synthesized
aagguugguauuaucagga

SEQ ID NO: 79043 - RNA, 19 nt, Artificial Sequence
  Chemically synthesized
uguagguaaaacuugccua

SEQ ID NO: 79044 - RNA, 19 nt, Artificial Sequence
  Chemically synthesized
uguaauggagugagcguag

SEQ ID NO: 79045 - RNA, 19 nt, Artificial Sequence
  Chemically synthesized
caccagugaguuagcagca

SEQ ID NO: 79046 - RNA, 19 nt, Artificial Sequence
  Chemically synthesized
agacgguagcuucugcagu

SEQ ID NO: 79047 - RNA, 19 nt, Artificial Sequence
  Chemically synthesized
acugcauuguugugccgag

SEQ ID NO: 79048 - RNA, 19 nt, Artificial Sequence
  Chemically synthesized
guucagacucacauucuau

SEQ ID NO: 79049 - RNA, 19 nt, Artificial Sequence
  Chemically synthesized
auguaagaguucagacuca

SEQ ID NO: 79050 - RNA, 19 nt, Artificial Sequence
  Chemically synthesized
gugaguccugcaucauuug

SEQ ID NO: 79051 - RNA, 19 nt, Artificial Sequence
  Chemically synthesized
cuuaauuugcuuuucccuu

SEQ ID NO: 79052 - RNA, 19 nt, Artificial Sequence
  Chemically synthesized
gaaaaccggugaaucuggg

SEQ ID NO: 79053 - RNA, 19 nt, Artificial Sequence
  Chemically synthesized
ugccaauguuaugguagau

SEQ ID NO: 79054 - RNA, 19 nt, Artificial Sequence
  Chemically synthesized
guuucucugcaguuuuccu

SEQ ID NO: 79055 - RNA, 19 nt, Artificial Sequence
  Chemically synthesized
aauuguggaguguuuuuac

SEQ ID NO: 79056 - RNA, 19 nt, Artificial Sequence
  Chemically synthesized
uucuguacaacuuaacuca

SEQ ID NO: 79057 - RNA, 19 nt, Artificial Sequence
  Chemically synthesized
ccuguuucucugcaguuuu

SEQ ID NO: 79058 - RNA, 19 nt, Artificial Sequence
  Chemically synthesized
auguguugcagcuuuauag

SEQ ID NO: 79059 - RNA, 19 nt, Artificial Sequence
  Chemically synthesized
aagugcuuuccuuaguuuu

SEQ ID NO: 79060 - RNA, 19 nt, Artificial Sequence
  Chemically synthesized
guagaugaugaaagaaagg

SEQ ID NO: 79061 - RNA, 19 nt, Artificial Sequence
  Chemically synthesized
agugucacggguaaaaacu

SEQ ID NO: 79062 - RNA, 19 nt, Artificial Sequence
  Chemically synthesized
gagcuguagguaaaacuug

SEQ ID NO: 79063 - RNA, 19 nt, Artificial Sequence
  Chemically synthesized
ucaaaggacaaagacagua

SEQ ID NO: 79064 - RNA, 19 nt, Artificial Sequence
  Chemically synthesized
aucaaaggacaaagacagu

SEQ ID NO: 79065 - RNA, 19 nt, Artificial Sequence
  Chemically synthesized
gauuuugaacagaacugcu

SEQ ID NO: 79066 - RNA, 19 nt, Artificial Sequence
  Chemically synthesized
uugugauuucauagcgagu

SEQ ID NO: 79067 - RNA, 19 nt, Artificial Sequence
  Chemically synthesized
guugccauugaacucacca

SEQ ID NO: 79068 - RNA, 19 nt, Artificial Sequence
  Chemically synthesized
ugcaguuaggaggugcaga

SEQ ID NO: 79069 - RNA, 19 nt, Artificial Sequence
  Chemically synthesized
cuuugagaagacgguagcu

SEQ ID NO: 79070 - RNA, 19 nt, Artificial Sequence
  Chemically synthesized
augccaacuuuuuguuaca

SEQ ID NO: 79071 - RNA, 19 nt, Artificial Sequence
  Chemically synthesized
gaggaagagaaaaugccug

SEQ ID NO: 79072 - RNA, 19 nt, Artificial Sequence
  Chemically synthesized
gacaguguuugacgaagcg

SEQ ID NO: 79073 - RNA, 19 nt, Artificial Sequence
  Chemically synthesized
ugauaaagacacgaucgag

SEQ ID NO: 79074 - RNA, 19 nt, Artificial Sequence
  Chemically synthesized
gcaaagugguauccugagg

SEQ ID NO: 79075 - RNA, 19 nt, Artificial Sequence
  Chemically synthesized
ccgugcaaagugguauccu

SEQ ID NO: 79076 - RNA, 19 nt, Artificial Sequence
  Chemically synthesized
cuugugaguccugcaucau

SEQ ID NO: 79077 - RNA, 19 nt, Artificial Sequence
  Chemically synthesized
uucugccaauguuauggua

SEQ ID NO: 79078 - RNA, 19 nt, Artificial Sequence
  Chemically synthesized
uuguggaguguuuuuacau

SEQ ID NO: 79079 - RNA, 19 nt, Artificial Sequence
  Chemically synthesized
guugcagaauuguggagug

SEQ ID NO: 79080 - RNA, 19 nt, Artificial Sequence
  Chemically synthesized
uucuguaaacugugcuagu

SEQ ID NO: 79081 - RNA, 19 nt, Artificial Sequence
  Chemically synthesized
auacugacccucuuuaccu

SEQ ID NO: 79082 - RNA, 19 nt, Artificial Sequence
  Chemically synthesized
acuaugaaccuucuuaaca

SEQ ID NO: 79083 - RNA, 19 nt, Artificial Sequence
  Chemically synthesized
cuuuccuuaguuuucuagu

SEQ ID NO: 79084 - RNA, 19 nt, Artificial Sequence
  Chemically synthesized
uuaguaaaagugcuuucca

SEQ ID NO: 79085 - RNA, 19 nt, Artificial Sequence
  Chemically synthesized
ugauaaugcauuagaaggu

SEQ ID NO: 79086 - RNA, 19 nt, Artificial Sequence
  Chemically synthesized
uuagucgcuaacuuaguaa

SEQ ID NO: 79087 - RNA, 19 nt, Artificial Sequence
  Chemically synthesized
ugguauuaucaggaaaugu

SEQ ID NO: 79088 - RNA, 19 nt, Artificial Sequence
  Chemically synthesized
aaugaaagugucacgggua

SEQ ID NO: 79089 - RNA, 19 nt, Artificial Sequence
  Chemically synthesized
agucuuugugauuucauag

SEQ ID NO: 79090 - RNA, 19 nt, Artificial Sequence
  Chemically synthesized
aggugcagacacuugcucu

SEQ ID NO: 79091 - RNA, 19 nt, Artificial Sequence
  Chemically synthesized
uugccaaaauaccuucuga

SEQ ID NO: 79092 - RNA, 19 nt, Artificial Sequence
  Chemically synthesized
cucaaugccaacuuuuugu

SEQ ID NO: 79093 - RNA, 19 nt, Artificial Sequence
  Chemically synthesized
acaguguuugacgaagcga

SEQ ID NO: 79094 - RNA, 19 nt, Artificial Sequence
  Chemically synthesized
ugcaaagugguauccugag

SEQ ID NO: 79095 - RNA, 19 nt, Artificial Sequence
  Chemically synthesized
uucagccacuacaacagaa

SEQ ID NO: 79096 - RNA, 19 nt, Artificial Sequence
  Chemically synthesized
augcauuuccuggagaaua

SEQ ID NO: 79097 - RNA, 19 nt, Artificial Sequence
  Chemically synthesized
ucgcuuugccuauugaugu

SEQ ID NO: 79098 - RNA, 19 nt, Artificial Sequence
  Chemically synthesized
aguaaaagugcuuuccaug

SEQ ID NO: 79099 - RNA, 19 nt, Artificial Sequence
  Chemically synthesized
aaggacaaagacaguauuu

SEQ ID NO: 79100 - RNA, 19 nt, Artificial Sequence
  Chemically synthesized
acuguaauggagugagcgu

SEQ ID NO: 79101 - RNA, 19 nt, Artificial Sequence
  Chemically synthesized
ugaagcguugccauugaac

SEQ ID NO: 79102 - RNA, 19 nt, Artificial Sequence
  Chemically synthesized
aguucucagaugcguaaag

SEQ ID NO: 79103 - RNA, 19 nt, Artificial Sequence
  Chemically synthesized
cuauguaguucucagaugc

SEQ ID NO: 79104 - RNA, 19 nt, Artificial Sequence
  Chemically synthesized
ugagaagacgguagcuucu

SEQ ID NO: 79105 - RNA, 19 nt, Artificial Sequence
  Chemically synthesized
gaagaggaagagaaaaugc

SEQ ID NO: 79106 - RNA, 19 nt, Artificial Sequence
  Chemically synthesized
ccaucaagugugugguggu

SEQ ID NO: 79107 - RNA, 19 nt, Artificial Sequence
  Chemically synthesized
ugcaggccaucaagugugu

SEQ ID NO: 79108 - RNA, 19 nt, Artificial Sequence
  Chemically synthesized
uguccgugcaaagugguau

SEQ ID NO: 79109 - RNA, 19 nt, Artificial Sequence
  Chemically synthesized
acagcuggacaagaagauu

SEQ ID NO: 79110 - RNA, 19 nt, Artificial Sequence
  Chemically synthesized
uaugggauacagcuggaca

SEQ ID NO: 79111 - RNA, 19 nt, Artificial Sequence
  Chemically synthesized
uucucugcaguuuuccuca

SEQ ID NO: 79112 - RNA, 19 nt, Artificial Sequence
  Chemically synthesized
auaucccuacugucuuuga

SEQ ID NO: 79113 - RNA, 19 nt, Artificial Sequence
  Chemically synthesized
aauauaucccuacugucuu

SEQ ID NO: 79114 - RNA, 19 nt, Artificial Sequence
  Chemically synthesized
agaauauaucccuacuguc

SEQ ID NO: 79115 - RNA, 19 nt, Artificial Sequence
  Chemically synthesized
uggagaauauaucccuacu

SEQ ID NO: 79116 - RNA, 19 nt, Artificial Sequence
  Chemically synthesized
gugcuagugcugacgaugu

SEQ ID NO: 79117 - RNA, 19 nt, Artificial Sequence
  Chemically synthesized
gauguuccuuugggucugu

SEQ ID NO: 79118 - RNA, 19 nt, Artificial Sequence
  Chemically synthesized
ucacuugaccaauacugac

SEQ ID NO: 79119 - RNA, 19 nt, Artificial Sequence
  Chemically synthesized
guguugcagcuuuauaguu

SEQ ID NO: 79120 - RNA, 19 nt, Artificial Sequence
  Chemically synthesized
uucuguuagucgcuaacuu

SEQ ID NO: 79121 - RNA, 19 nt, Artificial Sequence
  Chemically synthesized
uucugucaaaugcaguaga

SEQ ID NO: 79122 - RNA, 19 nt, Artificial Sequence
  Chemically synthesized
gugucacggguaaaaacuc

SEQ ID NO: 79123 - RNA, 19 nt, Artificial Sequence
  Chemically synthesized
aucagucuuugugauuuca

SEQ ID NO: 79124 - RNA, 19 nt, Artificial Sequence
  Chemically synthesized
cucuccuauguaguucuca

SEQ ID NO: 79125 - RNA, 19 nt, Artificial Sequence
  Chemically synthesized
cuuggaaccuuuguacgcu

SEQ ID NO: 79126 - RNA, 19 nt, Artificial Sequence
  Chemically synthesized
ccuacugucuuugacaauu

SEQ ID NO: 79127 - RNA, 19 nt, Artificial Sequence
  Chemically synthesized
uaacucacuggcgagaaua

SEQ ID NO: 79128 - RNA, 19 nt, Artificial Sequence
  Chemically synthesized
gacgauguucuguacaacu

SEQ ID NO: 79129 - RNA, 19 nt, Artificial Sequence
  Chemically synthesized
acugugcuagugcugacga

SEQ ID NO: 79130 - RNA, 19 nt, Artificial Sequence
  Chemically synthesized
uauugauguuccuuugggu

SEQ ID NO: 79131 - RNA, 19 nt, Artificial Sequence
  Chemically synthesized
uucuaguaacuagguguaa

SEQ ID NO: 79132 - RNA, 19 nt, Artificial Sequence
  Chemically synthesized
agugcuuuucuuauagaac

SEQ ID NO: 79133 - RNA, 19 nt, Artificial Sequence
  Chemically synthesized
auuguacaaggaaugaaag

SEQ ID NO: 79134 - RNA, 19 nt, Artificial Sequence
  Chemically synthesized
auacgaaguggagauuuac

SEQ ID NO: 79135 - RNA, 19 nt, Artificial Sequence
  Chemically synthesized
uucauagcgaguuuucuga

SEQ ID NO: 79136 - RNA, 19 nt, Artificial Sequence
  Chemically synthesized
ucugcaguuaggaggugca

SEQ ID NO: 79137 - RNA, 19 nt, Artificial Sequence
  Chemically synthesized
auaccuucugaacuacacu

SEQ ID NO: 79138 - RNA, 19 nt, Artificial Sequence
  Chemically synthesized
auuuagcccuaaaaugaca

SEQ ID NO: 79139 - RNA, 19 nt, Artificial Sequence
  Chemically synthesized
guaaaauaccuggagugcu

SEQ ID NO: 79140 - RNA, 19 nt, Artificial Sequence
  Chemically synthesized
ugucccaacacucccauca

SEQ ID NO: 79141 - RNA, 19 nt, Artificial Sequence
  Chemically synthesized
uucccuugugaguccugca

SEQ ID NO: 79142 - RNA, 19 nt, Artificial Sequence
  Chemically synthesized
auacagcuggacaagaaga

SEQ ID NO: 79143 - RNA, 19 nt, Artificial Sequence
  Chemically synthesized
auggaaaaccggugaaucu

SEQ ID NO: 79144 - RNA, 19 nt, Artificial Sequence
  Chemically synthesized
acucacuggcgagaauaca

SEQ ID NO: 79145 - RNA, 19 nt, Artificial Sequence
  Chemically synthesized
uguacaacuuaacucacug

SEQ ID NO: 79146 - RNA, 19 nt, Artificial Sequence
  Chemically synthesized
uagugcugacgauguucug

SEQ ID NO: 79147 - RNA, 19 nt, Artificial Sequence
  Chemically synthesized
aguuacacaaccaaugcau

SEQ ID NO: 79148 - RNA, 19 nt, Artificial Sequence
  Chemically synthesized
aagaauucuguuuagcugu

SEQ ID NO: 79149 - RNA, 19 nt, Artificial Sequence
  Chemically synthesized
uuaggaggugcagacacuu

SEQ ID NO: 79150 - RNA, 19 nt, Artificial Sequence
  Chemically synthesized
uuaagaguugccaaaauac

SEQ ID NO: 79151 - RNA, 19 nt, Artificial Sequence
  Chemically synthesized
uuuagcccuaaaaugacaa

SEQ ID NO: 79152 - RNA, 19 nt, Artificial Sequence
  Chemically synthesized
aacugaaggagaagaagcu

SEQ ID NO: 79153 - RNA, 19 nt, Artificial Sequence
  Chemically synthesized
aucgagaaacugaaggaga

SEQ ID NO: 79154 - RNA, 19 nt, Artificial Sequence
  Chemically synthesized
cugcaguuuuccucagcuu

SEQ ID NO: 79155 - RNA, 19 nt, Artificial Sequence
  Chemically synthesized
gauggaaaaccggugaauc

SEQ ID NO: 79156 - RNA, 19 nt, Artificial Sequence
  Chemically synthesized
aaauugacaguugcagaau

SEQ ID NO: 79157 - RNA, 19 nt, Artificial Sequence
  Chemically synthesized
uaaacugugcuagugcuga

SEQ ID NO: 79158 - RNA, 19 nt, Artificial Sequence
  Chemically synthesized
guuccuuugggucugugag

SEQ ID NO: 79159 - RNA, 19 nt, Artificial Sequence
  Chemically synthesized
gucgcuuugccuauugaug

SEQ ID NO: 79160 - RNA, 19 nt, Artificial Sequence
  Chemically synthesized
aauacugacccucuuuacc

SEQ ID NO: 79161 - RNA, 19 nt, Artificial Sequence
  Chemically synthesized
cugaucaguuacacaacca

SEQ ID NO: 79162 - RNA, 19 nt, Artificial Sequence
  Chemically synthesized
uaaaagugcuuuccauguu

SEQ ID NO: 79163 - RNA, 19 nt, Artificial Sequence
  Chemically synthesized
uguuagucgcuaacuuagu

SEQ ID NO: 79164 - RNA, 19 nt, Artificial Sequence
  Chemically synthesized
uacauuguacaaggaauga

SEQ ID NO: 79165 - RNA, 19 nt, Artificial Sequence
  Chemically synthesized
uacacuacauuguacaagg

SEQ ID NO: 79166 - RNA, 19 nt, Artificial Sequence
  Chemically synthesized
gugaucaaaggacaaagac

SEQ ID NO: 79167 - RNA, 19 nt, Artificial Sequence
  Chemically synthesized
ucuguuuagcugugggugu

SEQ ID NO: 79168 - RNA, 19 nt, Artificial Sequence
  Chemically synthesized
cauuuccuguuucucugca

SEQ ID NO: 79169 - RNA, 19 nt, Artificial Sequence
  Chemically synthesized
cacugcauuguugugccga

SEQ ID NO: 79170 - RNA, 19 nt, Artificial Sequence
  Chemically synthesized
acucaaugccaacuuuuug

SEQ ID NO: 79171 - RNA, 19 nt, Artificial Sequence
  Chemically synthesized
cuagccauggcuaaggaga

SEQ ID NO: 79172 - RNA, 19 nt, Artificial Sequence
  Chemically synthesized
acugucccaacacucccau

SEQ ID NO: 79173 - RNA, 19 nt, Artificial Sequence
  Chemically synthesized
ucuuaauuugcuuuucccu

SEQ ID NO: 79174 - RNA, 19 nt, Artificial Sequence
  Chemically synthesized
ugacaguugcagaauugug

SEQ ID NO: 79175 - RNA, 19 nt, Artificial Sequence
  Chemically synthesized
caucacugucuugccagau

SEQ ID NO: 79176 - RNA, 19 nt, Artificial Sequence
  Chemically synthesized
agugcuuuccauguuacuu

SEQ ID NO: 79177 - RNA, 19 nt, Artificial Sequence
  Chemically synthesized
cugacugagcaauaugccu

SEQ ID NO: 79178 - RNA, 19 nt, Artificial Sequence
  Chemically synthesized
acuuaguaagugcuuuucu

SEQ ID NO: 79179 - RNA, 19 nt, Artificial Sequence
  Chemically synthesized
cuuuaaacugguuguucug

SEQ ID NO: 79180 - RNA, 19 nt, Artificial Sequence
  Chemically synthesized
acaaagacaguauuuugac

SEQ ID NO: 79181 - RNA, 19 nt, Artificial Sequence
  Chemically synthesized
auuucauagcgaguuuucu

SEQ ID NO: 79182 - RNA, 19 nt, Artificial Sequence
  Chemically synthesized
uucucagaugcguaaagca

SEQ ID NO: 79183 - RNA, 19 nt, Artificial Sequence
  Chemically synthesized
uagccauggcuaaggagau

SEQ ID NO: 79184 - RNA, 19 nt, Artificial Sequence
  Chemically synthesized
gaugauaaagacacgaucg

SEQ ID NO: 79185 - RNA, 19 nt, Artificial Sequence
  Chemically synthesized
aauacagcgugggacccuu

SEQ ID NO: 79186 - RNA, 19 nt, Artificial Sequence
  Chemically synthesized
aaacugugcuagugcugac

SEQ ID NO: 79187 - RNA, 19 nt, Artificial Sequence
  Chemically synthesized
gagguucuguaaacugugc

SEQ ID NO: 79188 - RNA, 19 nt, Artificial Sequence
  Chemically synthesized
uaacaucacugucuugcca

SEQ ID NO: 79189 - RNA, 19 nt, Artificial Sequence
  Chemically synthesized
acuagguguaaaaaucaug

SEQ ID NO: 79190 - RNA, 19 nt, Artificial Sequence
  Chemically synthesized
aguuuucuaguaacuaggu

SEQ ID NO: 79191 - RNA, 19 nt, Artificial Sequence
  Chemically synthesized
gauuaguaaaagugcuuuc

SEQ ID NO: 79192 - RNA, 19 nt, Artificial Sequence
  Chemically synthesized
cgcuaacuuaguaagugcu

SEQ ID NO: 79193 - RNA, 19 nt, Artificial Sequence
  Chemically synthesized
caaauugggcauuuaauuc

SEQ ID NO: 79194 - RNA, 19 nt, Artificial Sequence
  Chemically synthesized
ggaaugaaagugucacggg

SEQ ID NO: 79195 - RNA, 19 nt, Artificial Sequence
  Chemically synthesized
guucccgacauaacauugu

SEQ ID NO: 79196 - RNA, 19 nt, Artificial Sequence
  Chemically synthesized
gaaugaagcguugccauug

SEQ ID NO: 79197 - RNA, 19 nt, Artificial Sequence
  Chemically synthesized
aagaccuucgucuuugaga

SEQ ID NO: 79198 - RNA, 19 nt, Artificial Sequence
  Chemically synthesized
aacuacacugcauuguugu

SEQ ID NO: 79199 - RNA, 19 nt, Artificial Sequence
  Chemically synthesized
aauaccuucugaacuacac

SEQ ID NO: 79200 - RNA, 19 nt, Artificial Sequence
  Chemically synthesized
cccuuggaaccuuuguacg

SEQ ID NO: 79201 - RNA, 19 nt, Artificial Sequence
  Chemically synthesized
uggugcuguaaaauaccug

SEQ ID NO: 79202 - RNA, 19 nt, Artificial Sequence
  Chemically synthesized
guccgugcaaagugguauc

SEQ ID NO: 79203 - RNA, 19 nt, Artificial Sequence
  Chemically synthesized
uacagcuggacaagaagau

SEQ ID NO: 79204 - RNA, 19 nt, Artificial Sequence
  Chemically synthesized
ugguagauggaaaaccggu

SEQ ID NO: 79205 - RNA, 19 nt, Artificial Sequence
  Chemically synthesized
caguugcagaauuguggag

SEQ ID NO: 79206 - RNA, 19 nt, Artificial Sequence
  Chemically synthesized
agugcugacgauguucugu

SEQ ID NO: 79207 - RNA, 19 nt, Artificial Sequence
  Chemically synthesized
uguaaacugugcuagugcu

SEQ ID NO: 79208 - RNA, 19 nt, Artificial Sequence
  Chemically synthesized
uuucuaguaacuaggugua

SEQ ID NO: 79209 - RNA, 19 nt, Artificial Sequence
  Chemically synthesized
aauaagugcuuuccuuagu

SEQ ID NO: 79210 - RNA, 19 nt, Artificial Sequence
  Chemically synthesized
ugucgauuaguaaaagugc

SEQ ID NO: 79211 - RNA, 19 nt, Artificial Sequence
  Chemically synthesized
ucuuuaaacugguuguucu

SEQ ID NO: 79212 - RNA, 19 nt, Artificial Sequence
  Chemically synthesized
uuguacaaggaaugaaagu

SEQ ID NO: 79213 - RNA, 19 nt, Artificial Sequence
  Chemically synthesized
cacguguucccgacauaac

SEQ ID NO: 79214 - RNA, 19 nt, Artificial Sequence
  Chemically synthesized
cguugccauugaacucacc

SEQ ID NO: 79215 - RNA, 19 nt, Artificial Sequence
  Chemically synthesized
agacacuugcucuccuaug

SEQ ID NO: 79216 - RNA, 19 nt, Artificial Sequence
  Chemically synthesized
augacaagccuucuuaaag

SEQ ID NO: 79217 - RNA, 19 nt, Artificial Sequence
  Chemically synthesized
ccuuggaaccuuuguacgc

SEQ ID NO: 79218 - RNA, 19 nt, Artificial Sequence
  Chemically synthesized
ucugggcuuaugggauaca

SEQ ID NO: 79219 - RNA, 19 nt, Artificial Sequence
  Chemically synthesized
gugaaucugggcuuauggg

SEQ ID NO: 79220 - RNA, 19 nt, Artificial Sequence
  Chemically synthesized
ccaauguuaugguagaugg

SEQ ID NO: 79221 - RNA, 19 nt, Artificial Sequence
  Chemically synthesized
acccuucagccacuacaac

SEQ ID NO: 79222 - RNA, 19 nt, Artificial Sequence
  Chemically synthesized
cucacuggcgagaauacag

SEQ ID NO: 79223 - RNA, 19 nt, Artificial Sequence
  Chemically synthesized
uguucuguacaacuuaacu

SEQ ID NO: 79224 - RNA, 19 nt, Artificial Sequence
  Chemically synthesized
gcuagugcugacgauguuc

SEQ ID NO: 79225 - RNA, 19 nt, Artificial Sequence
  Chemically synthesized
cuucugacugagcaauaug

SEQ ID NO: 79226 - RNA, 19 nt, Artificial Sequence
  Chemically synthesized
uuuccuuucucuuacaccu

SEQ ID NO: 79227 - RNA, 19 nt, Artificial Sequence
  Chemically synthesized
uugcggagauuuugaacag

SEQ ID NO: 79228 - RNA, 19 nt, Artificial Sequence
  Chemically synthesized
cguaaagcagaacagccuc

SEQ ID NO: 79229 - RNA, 19 nt, Artificial Sequence
  Chemically synthesized
aacaccgagcacugaacuu

SEQ ID NO: 79230 - RNA, 19 nt, Artificial Sequence
  Chemically synthesized
cuuguucagauuaagaguu

SEQ ID NO: 79231 - RNA, 19 nt, Artificial Sequence
  Chemically synthesized
uguuguaaaugucucagcc

SEQ ID NO: 79232 - RNA, 19 nt, Artificial Sequence
  Chemically synthesized
gaucgagaaacugaaggag

SEQ ID NO: 79233 - RNA, 19 nt, Artificial Sequence
  Chemically synthesized
auguuuugcauguaugacu

SEQ ID NO: 79234 - RNA, 19 nt, Artificial Sequence
  Chemically synthesized
uuugcuaaugcaauuagca

SEQ ID NO: 79235 - RNA, 19 nt, Artificial Sequence
  Chemically synthesized
aaugcauuuccuggagaau

SEQ ID NO: 79236 - RNA, 19 nt, Artificial Sequence
  Chemically synthesized
uuugccuauugauguuccu

SEQ ID NO: 79237 - RNA, 19 nt, Artificial Sequence
  Chemically synthesized
gauuaccgacacugucacu

SEQ ID NO: 79238 - RNA, 19 nt, Artificial Sequence
  Chemically synthesized
aaaucauguguugcagcuu

SEQ ID NO: 79239 - RNA, 19 nt, Artificial Sequence
  Chemically synthesized
uccuguuucucugcaguuu

SEQ ID NO: 79240 - RNA, 19 nt, Artificial Sequence
  Chemically synthesized
cugauaaugcauuagaagg

SEQ ID NO: 79241 - RNA, 19 nt, Artificial Sequence
  Chemically synthesized
gugcuuuucuuauagaacc

SEQ ID NO: 79242 - RNA, 19 nt, Artificial Sequence
  Chemically synthesized
ucuuacaccugccaugccu

SEQ ID NO: 79243 - RNA, 19 nt, Artificial Sequence
  Chemically synthesized
guuuucuuaagcuuuuccu

SEQ ID NO: 79244 - RNA, 19 nt, Artificial Sequence
  Chemically synthesized
guuaauuucugucaaaugc

SEQ ID NO: 79245 - RNA, 19 nt, Artificial Sequence
  Chemically synthesized
gauuucauagcgaguuuuc

SEQ ID NO: 79246 - RNA, 19 nt, Artificial Sequence
  Chemically synthesized
auguaguucucagaugcgu

SEQ ID NO: 79247 - RNA, 19 nt, Artificial Sequence
  Chemically synthesized
guaaagagggucaguauug

SEQ ID NO: 79248 - RNA, 19 nt, Artificial Sequence
  Chemically synthesized
uucaguuucucgaucgugu

SEQ ID NO: 79249 - RNA, 19 nt, Artificial Sequence
  Chemically synthesized
uuucucuuccucuucuuca

SEQ ID NO: 79250 - RNA, 19 nt, Artificial Sequence
  Chemically synthesized
ucugaauaaaguaacaugg

SEQ ID NO: 79251 - RNA, 19 nt, Artificial Sequence
  Chemically synthesized
uuuaguucccacuaggaug

SEQ ID NO: 79252 - RNA, 19 nt, Artificial Sequence
  Chemically synthesized
uucuccaggaaaugcauug

SEQ ID NO: 79253 - RNA, 19 nt, Artificial Sequence
  Chemically synthesized
uuuagaguuuuuacccgug

SEQ ID NO: 79254 - RNA, 19 nt, Artificial Sequence
  Chemically synthesized
uuaagaaggcuugucauuu

SEQ ID NO: 79255 - RNA, 19 nt, Artificial Sequence
  Chemically synthesized
uccaucuaccauaacauug

SEQ ID NO: 79256 - RNA, 19 nt, Artificial Sequence
  Chemically synthesized
uagggauauauucuccagg

SEQ ID NO: 79257 - RNA, 19 nt, Artificial Sequence
  Chemically synthesized
uuuuccaucuaccauaaca

SEQ ID NO: 79258 - RNA, 19 nt, Artificial Sequence
  Chemically synthesized
uuuuacccgugacacuuuc

SEQ ID NO: 79259 - RNA, 19 nt, Artificial Sequence
  Chemically synthesized
uugcaaaguucagugcucg

SEQ ID NO: 79260 - RNA, 19 nt, Artificial Sequence
  Chemically synthesized
uuuuagaguuuuuacccgu

SEQ ID NO: 79261 - RNA, 19 nt, Artificial Sequence
  Chemically synthesized
uuaaucugaacaagaaugg

SEQ ID NO: 79262 - RNA, 19 nt, Artificial Sequence
  Chemically synthesized
ugucaaaauacugucuuug

SEQ ID NO: 79263 - RNA, 19 nt, Artificial Sequence
  Chemically synthesized
uucagugcucgguguucuc

SEQ ID NO: 79264 - RNA, 19 nt, Artificial Sequence
  Chemically synthesized
uuuccaucuaccauaacau

SEQ ID NO: 79265 - RNA, 19 nt, Artificial Sequence
  Chemically synthesized
auguuaagaagguucauag

SEQ ID NO: 79266 - RNA, 19 nt, Artificial Sequence
  Chemically synthesized
ucaaaaucuccgcaaaagc

SEQ ID NO: 79267 - RNA, 19 nt, Artificial Sequence
  Chemically synthesized
cuuucuuucaucaucuacu

SEQ ID NO: 79268 - RNA, 19 nt, Artificial Sequence
  Chemically synthesized
ugucuuuguccuuugauca

SEQ ID NO: 79269 - RNA, 19 nt, Artificial Sequence
  Chemically synthesized
ugcaguguaguucagaagg

SEQ ID NO: 79270 - RNA, 19 nt, Artificial Sequence
  Chemically synthesized
ucucgaucgugucuuuauc

SEQ ID NO: 79271 - RNA, 19 nt, Artificial Sequence
  Chemically synthesized
uauauucuccaggaaaugc

SEQ ID NO: 79272 - RNA, 19 nt, Artificial Sequence
  Chemically synthesized
uguucucggcacaacaaug

SEQ ID NO: 79273 - RNA, 19 nt, Artificial Sequence
  Chemically synthesized
ucugcuuuacgcaucugag

SEQ ID NO: 79274 - RNA, 19 nt, Artificial Sequence
  Chemically synthesized
ucaggauaccacuuugcac

SEQ ID NO: 79275 - RNA, 19 nt, Artificial Sequence
  Chemically synthesized
uauaaagcugcaacacaug

SEQ ID NO: 79276 - RNA, 19 nt, Artificial Sequence
  Chemically synthesized
uaaaucuccacuucguauu

SEQ ID NO: 79277 - RNA, 19 nt, Artificial Sequence
  Chemically synthesized
ucgcuaugaaaucacaaag

SEQ ID NO: 79278 - RNA, 19 nt, Artificial Sequence
  Chemically synthesized
acuccagguauuuuacagc

SEQ ID NO: 79279 - RNA, 19 nt, Artificial Sequence
  Chemically synthesized
accuuuuagaguuuuuacc

SEQ ID NO: 79280 - RNA, 19 nt, Artificial Sequence
  Chemically synthesized
uuucucgaucgugucuuua

SEQ ID NO: 79281 - RNA, 19 nt, Artificial Sequence
  Chemically synthesized
aaggaaagcacuuauuagc

SEQ ID NO: 79282 - RNA, 19 nt, Artificial Sequence
  Chemically synthesized
uaaaguaacauggaaagca

SEQ ID NO: 79283 - RNA, 19 nt, Artificial Sequence
  Chemically synthesized
uguguaacugaucaguagg

SEQ ID NO: 79284 - RNA, 19 nt, Artificial Sequence
  Chemically synthesized
uuagaguuuuuacccguga

SEQ ID NO: 79285 - RNA, 19 nt, Artificial Sequence
  Chemically synthesized
acccgugacacuuucauuc

SEQ ID NO: 79286 - RNA, 19 nt, Artificial Sequence
  Chemically synthesized
uuuacaacagcaggcauuu

SEQ ID NO: 79287 - RNA, 19 nt, Artificial Sequence
  Chemically synthesized
ucaaacacugucuugaggc

SEQ ID NO: 79288 - RNA, 19 nt, Artificial Sequence
  Chemically synthesized
caggauaccacuuugcacg

SEQ ID NO: 79289 - RNA, 19 nt, Artificial Sequence
  Chemically synthesized
auaaucuucuuguccagcu

SEQ ID NO: 79290 - RNA, 19 nt, Artificial Sequence
  Chemically synthesized
auggaaagcacuuuuacua

SEQ ID NO: 79291 - RNA, 19 nt, Artificial Sequence
  Chemically synthesized
uuuuuacccgugacacuuu

SEQ ID NO: 79292 - RNA, 19 nt, Artificial Sequence
  Chemically synthesized
uuuacccgugacacuuuca

SEQ ID NO: 79293 - RNA, 19 nt, Artificial Sequence
  Chemically synthesized
uucauucgggaggcuguuc

SEQ ID NO: 79294 - RNA, 19 nt, Artificial Sequence
  Chemically synthesized
uacgcaucugagaacuaca

SEQ ID NO: 79295 - RNA, 19 nt, Artificial Sequence
  Chemically synthesized
ugugagucugaacucuuac

SEQ ID NO: 79296 - RNA, 19 nt, Artificial Sequence
  Chemically synthesized
ucucuuccucuucuucacg

SEQ ID NO: 79297 - RNA, 19 nt, Artificial Sequence
  Chemically synthesized
aucccauaagcccagauuc

SEQ ID NO: 79298 - RNA, 19 nt, Artificial Sequence
  Chemically synthesized
uagcucugaauaaaguaac

SEQ ID NO: 79299 - RNA, 19 nt, Artificial Sequence
  Chemically synthesized
uaacauggaaagcacuuuu

SEQ ID NO: 79300 - RNA, 19 nt, Artificial Sequence
  Chemically synthesized
ucaaaauacugucuuuguc

SEQ ID NO: 79301 - RNA, 19 nt, Artificial Sequence
  Chemically synthesized
auacugucuuuguccuuug

SEQ ID NO: 79302 - RNA, 19 nt, Artificial Sequence
  Chemically synthesized
aucuguaacaaaaaguugg

SEQ ID NO: 79303 - RNA, 19 nt, Artificial Sequence
  Chemically synthesized
aaaaaguuggcauugagug

SEQ ID NO: 79304 - RNA, 19 nt, Artificial Sequence
  Chemically synthesized
ucaguuucucgaucguguc

SEQ ID NO: 79305 - RNA, 19 nt, Artificial Sequence
  Chemically synthesized
ucaaguuuaguucccacua

SEQ ID NO: 79306 - RNA, 19 nt, Artificial Sequence
  Chemically synthesized
aagaaaagcacuuacuaag

SEQ ID NO: 79307 - RNA, 19 nt, Artificial Sequence
  Chemically synthesized
uguaguguaaaucuccacu

SEQ ID NO: 79308 - RNA, 19 nt, Artificial Sequence
  Chemically synthesized
uguuaugucgggaacacgu

SEQ ID NO: 79309 - RNA, 19 nt, Artificial Sequence
  Chemically synthesized
uuuaagaaggcuugucauu

SEQ ID NO: 79310 - RNA, 19 nt, Artificial Sequence
  Chemically synthesized
uucucuuccucuucuucac

SEQ ID NO: 79311 - RNA, 19 nt, Artificial Sequence
  Chemically synthesized
uucucgaucgugucuuuau

SEQ ID NO: 79312 - RNA, 19 nt, Artificial Sequence
  Chemically synthesized
cauaagcccagauucaccg

SEQ ID NO: 79313 - RNA, 19 nt, Artificial Sequence
  Chemically synthesized
ugucugcaccuccuaacug

SEQ ID NO: 79314 - RNA, 19 nt, Artificial Sequence
  Chemically synthesized
ucaucuacugcauuugaca

SEQ ID NO: 79315 - RNA, 19 nt, Artificial Sequence
  Chemically synthesized
aucuccacuucguauuuug

SEQ ID NO: 79316 - RNA, 19 nt, Artificial Sequence
  Chemically synthesized
uccacuucguauuuuguca

SEQ ID NO: 79317 - RNA, 19 nt, Artificial Sequence
  Chemically synthesized
caaaauacugucuuugucc

SEQ ID NO: 79318 - RNA, 19 nt, Artificial Sequence
  Chemically synthesized
guauuuuacagcaccaauc

SEQ ID NO: 79319 - RNA, 19 nt, Artificial Sequence
  Chemically synthesized
uaggaugaugggaguguug

SEQ ID NO: 79320 - RNA, 19 nt, Artificial Sequence
  Chemically synthesized
uccagcuguaucccauaag

SEQ ID NO: 79321 - RNA, 19 nt, Artificial Sequence
  Chemically synthesized
ucuaccauaacauuggcag

SEQ ID NO: 79322 - RNA, 19 nt, Artificial Sequence
  Chemically synthesized
aacauuggcagaauaauug

SEQ ID NO: 79323 - RNA, 19 nt, Artificial Sequence
  Chemically synthesized
uugguuguguaacugauca

SEQ ID NO: 79324 - RNA, 19 nt, Artificial Sequence
  Chemically synthesized
uuucaucaucuacugcauu

SEQ ID NO: 79325 - RNA, 19 nt, Artificial Sequence
  Chemically synthesized
ucuuuguccuuugaucaca

SEQ ID NO: 79326 - RNA, 19 nt, Artificial Sequence
  Chemically synthesized
acuccauuacaguacaaug

SEQ ID NO: 79327 - RNA, 19 nt, Artificial Sequence
  Chemically synthesized
ucuuccucuucuucacggg

SEQ ID NO: 79328 - RNA, 19 nt, Artificial Sequence
  Chemically synthesized
uuguccagcuguaucccau

SEQ ID NO: 79329 - RNA, 19 nt, Artificial Sequence
  Chemically synthesized
auauucuccaggaaaugca

SEQ ID NO: 79330 - RNA, 19 nt, Artificial Sequence
  Chemically synthesized
aaaacuauaaagcugcaac

SEQ ID NO: 79331 - RNA, 19 nt, Artificial Sequence
  Chemically synthesized
uauaauacaaggaggcaua

SEQ ID NO: 79332 - RNA, 19 nt, Artificial Sequence
  Chemically synthesized
ucaauggcaacgcuucauu

SEQ ID NO: 79333 - RNA, 19 nt, Artificial Sequence
  Chemically synthesized
ucauucgggaggcuguucu

SEQ ID NO: 79334 - RNA, 19 nt, Artificial Sequence
  Chemically synthesized
aacugcagaagcuaccguc

SEQ ID NO: 79335 - RNA, 19 nt, Artificial Sequence
  Chemically synthesized
aggcauuuucucuuccucu

SEQ ID NO: 79336 - RNA, 19 nt, Artificial Sequence
  Chemically synthesized
uaauugucaaagacaguag

SEQ ID NO: 79337 - RNA, 19 nt, Artificial Sequence
  Chemically synthesized
uagaguuuuuacccgugac

SEQ ID NO: 79338 - RNA, 19 nt, Artificial Sequence
  Chemically synthesized
auguaguguaaaucuccac

SEQ ID NO: 79339 - RNA, 19 nt, Artificial Sequence
  Chemically synthesized
ugucuuuaucaucccuaag

SEQ ID NO: 79340 - RNA, 19 nt, Artificial Sequence
  Chemically synthesized
uuugcacggacauuuucaa

SEQ ID NO: 79341 - RNA, 19 nt, Artificial Sequence
  Chemically synthesized
ucuuguccagcuguauccc

SEQ ID NO: 79342 - RNA, 19 nt, Artificial Sequence
  Chemically synthesized
uccacaauucugcaacugu

SEQ ID NO: 79343 - RNA, 19 nt, Artificial Sequence
  Chemically synthesized
aucaauaggcaaagcgacu

SEQ ID NO: 79344 - RNA, 19 nt, Artificial Sequence
  Chemically synthesized
aucgacaaaaaaaccuucu

SEQ ID NO: 79345 - RNA, 19 nt, Artificial Sequence
  Chemically synthesized
uaaguuagcgacuaacaga

SEQ ID NO: 79346 - RNA, 19 nt, Artificial Sequence
  Chemically synthesized
ccuuuuagaguuuuuaccc

SEQ ID NO: 79347 - RNA, 19 nt, Artificial Sequence
  Chemically synthesized
aguucaauggcaacgcuuc

SEQ ID NO: 79348 - RNA, 19 nt, Artificial Sequence
  Chemically synthesized
ucuguaacaaaaaguuggc

SEQ ID NO: 79349 - RNA, 19 nt, Artificial Sequence
  Chemically synthesized
auuuacaacagcaggcauu

SEQ ID NO: 79350 - RNA, 19 nt, Artificial Sequence
  Chemically synthesized
uuccucuucuucacgggag

SEQ ID NO: 79351 - RNA, 19 nt, Artificial Sequence
  Chemically synthesized
uaucccauaagcccagauu

SEQ ID NO: 79352 - RNA, 19 nt, Artificial Sequence
  Chemically synthesized
agcgacuaacagaacaacc

SEQ ID NO: 79353 - RNA, 19 nt, Artificial Sequence
  Chemically synthesized
ugacacuuucauuccuugu

SEQ ID NO: 79354 - RNA, 19 nt, Artificial Sequence
  Chemically synthesized
uguccuuugaucacacaca

SEQ ID NO: 79355 - RNA, 19 nt, Artificial Sequence
  Chemically synthesized
augaugggaguguugggac

SEQ ID NO: 79356 - RNA, 19 nt, Artificial Sequence
  Chemically synthesized
cuuugcacggacauuuuca

SEQ ID NO: 79357 - RNA, 19 nt, Artificial Sequence
  Chemically synthesized
auugguuguguaacugauc

SEQ ID NO: 79358 - RNA, 19 nt, Artificial Sequence
  Chemically synthesized
caauguaguguaaaucucc

SEQ ID NO: 79359 - RNA, 19 nt, Artificial Sequence
  Chemically synthesized
aauacugucuuuguccuuu

SEQ ID NO: 79360 - RNA, 19 nt, Artificial Sequence
  Chemically synthesized
uaggugaugggagucagcu

SEQ ID NO: 79361 - RNA, 19 nt, Artificial Sequence
  Chemically synthesized
aggaugaugggaguguugg

SEQ ID NO: 79362 - RNA, 19 nt, Artificial Sequence
  Chemically synthesized
cuuuuagaguuuuuacccg

SEQ ID NO: 79363 - RNA, 19 nt, Artificial Sequence
  Chemically synthesized
uccuuugaucacacacacc

SEQ ID NO: 79364 - RNA, 19 nt, Artificial Sequence
  Chemically synthesized
acacgugcugcuaacucac

SEQ ID NO: 79365 - RNA, 19 nt, Artificial Sequence
  Chemically synthesized
ucugaacucuuacauuuag

SEQ ID NO: 79366 - RNA, 19 nt, Artificial Sequence
  Chemically synthesized
agucagcuucuucuccuuc

SEQ ID NO: 79367 - RNA, 19 nt, Artificial Sequence
  Chemically synthesized
ugcacggacauuuucaaau

SEQ ID NO: 79368 - RNA, 19 nt, Artificial Sequence
  Chemically synthesized
uaagcccagauucaccggu

SEQ ID NO: 79369 - RNA, 19 nt, Artificial Sequence
  Chemically synthesized
uacuaaguuagcgacuaac

SEQ ID NO: 79370 - RNA, 19 nt, Artificial Sequence
  Chemically synthesized
ugauaauaccaaccuuucu

SEQ ID NO: 79371 - RNA, 19 nt, Artificial Sequence
  Chemically synthesized
aauguaguguaaaucucca

SEQ ID NO: 79372 - RNA, 19 nt, Artificial Sequence
  Chemically synthesized
uguaaaucuccacuucgua

SEQ ID NO: 79373 - RNA, 19 nt, Artificial Sequence
  Chemically synthesized
cuccacuucguauuuuguc

SEQ ID NO: 79374 - RNA, 19 nt, Artificial Sequence
  Chemically synthesized
ugauccaaagagcugagcu

SEQ ID NO: 79375 - RNA, 19 nt, Artificial Sequence
  Chemically synthesized
ccagguauuuuacagcacc

SEQ ID NO: 79376 - RNA, 19 nt, Artificial Sequence
  Chemically synthesized
auaagcccagauucaccgg

SEQ ID NO: 79377 - RNA, 19 nt, Artificial Sequence
  Chemically synthesized
uaagucauacaugcaaaac

SEQ ID NO: 79378 - RNA, 19 nt, Artificial Sequence
  Chemically synthesized
aauucugcaacugucaauu

SEQ ID NO: 79379 - RNA, 19 nt, Artificial Sequence
  Chemically synthesized
ucaauaggcaaagcgacua

SEQ ID NO: 79380 - RNA, 19 nt, Artificial Sequence
  Chemically synthesized
ucaguauuggucaagugac

SEQ ID NO: 79381 - RNA, 19 nt, Artificial Sequence
  Chemically synthesized
aaucgacaaaaaaaccuuc

SEQ ID NO: 79382 - RNA, 19 nt, Artificial Sequence
  Chemically synthesized
uuagcgacuaacagaacaa

SEQ ID NO: 79383 - RNA, 19 nt, Artificial Sequence
  Chemically synthesized
cugauaauaccaaccuuuc

SEQ ID NO: 79384 - RNA, 19 nt, Artificial Sequence
  Chemically synthesized
uuacccgugacacuuucau

SEQ ID NO: 79385 - RNA, 19 nt, Artificial Sequence
  Chemically synthesized
aguguaaaucuccacuucg

SEQ ID NO: 79386 - RNA, 19 nt, Artificial Sequence
  Chemically synthesized
ucuccacuucguauuuugu

SEQ ID NO: 79387 - RNA, 19 nt, Artificial Sequence
  Chemically synthesized
cugucuuuguccuuugauc

SEQ ID NO: 79388 - RNA, 19 nt, Artificial Sequence
  Chemically synthesized
uccuaacugcagaagcuac

SEQ ID NO: 79389 - RNA, 19 nt, Artificial Sequence
  Chemically synthesized
agagaaacaggaaauggcc

SEQ ID NO: 79390 - RNA, 19 nt, Artificial Sequence
  Chemically synthesized
guaaucugucauaaucuuc

SEQ ID NO: 79391 - RNA, 19 nt, Artificial Sequence
  Chemically synthesized
cuucuuguccagcuguauc

SEQ ID NO: 79392 - RNA, 19 nt, Artificial Sequence
  Chemically synthesized
ucugcaacugucaauuuaa

SEQ ID NO: 79393 - RNA, 19 nt, Artificial Sequence
  Chemically synthesized
agaagguucauaguuuaag

SEQ ID NO: 79394 - RNA, 19 nt, Artificial Sequence
  Chemically synthesized
cauuugacagaaauuaacc

SEQ ID NO: 79395 - RNA, 19 nt, Artificial Sequence
  Chemically synthesized
guacaauguaguguaaauc

SEQ ID NO: 79396 - RNA, 19 nt, Artificial Sequence
  Chemically synthesized
agacauuuacaacagcagg

SEQ ID NO: 79397 - RNA, 19 nt, Artificial Sequence
  Chemically synthesized
aguuucucgaucgugucuu

SEQ ID NO: 79398 - RNA, 19 nt, Artificial Sequence
  Chemically synthesized
uugcacggacauuuucaaa

SEQ ID NO: 79399 - RNA, 19 nt, Artificial Sequence
  Chemically synthesized
auugcauuagcaaaagauc

SEQ ID NO: 79400 - RNA, 19 nt, Artificial Sequence
  Chemically synthesized
aaugcauugguuguguaac

SEQ ID NO: 79401 - RNA, 19 nt, Artificial Sequence
  Chemically synthesized
guuuuuacccgugacacuu

SEQ ID NO: 79402 - RNA, 19 nt, Artificial Sequence
  Chemically synthesized
ucacaaagacugauccaaa

SEQ ID NO: 79403 - RNA, 19 nt, Artificial Sequence
  Chemically synthesized
ugcuacgcucacuccauua

SEQ ID NO: 79404 - RNA, 19 nt, Artificial Sequence
  Chemically synthesized
accuccuaacugcagaagc

SEQ ID NO: 79405 - RNA, 19 nt, Artificial Sequence
  Chemically synthesized
ccuaacugcagaagcuacc

SEQ ID NO: 79406 - RNA, 19 nt, Artificial Sequence
  Chemically synthesized
uaacugcagaagcuaccgu

SEQ ID NO: 79407 - RNA, 19 nt, Artificial Sequence
  Chemically synthesized
caaaguucagugcucggug

SEQ ID NO: 79408 - RNA, 19 nt, Artificial Sequence
  Chemically synthesized
cuucaguuucucgaucgug

SEQ ID NO: 79409 - RNA, 19 nt, Artificial Sequence
  Chemically synthesized
ccauaagcccagauucacc

SEQ ID NO: 79410 - RNA, 19 nt, Artificial Sequence
  Chemically synthesized
uguacagaacaucgucagc

SEQ ID NO: 79411 - RNA, 19 nt, Artificial Sequence
  Chemically synthesized
uaaggaaagcacuuauuag

SEQ ID NO: 79412 - RNA, 19 nt, Artificial Sequence
  Chemically synthesized
cucugaauaaaguaacaug

SEQ ID NO: 79413 - RNA, 19 nt, Artificial Sequence
  Chemically synthesized
acuaaucgacaaaaaaacc

SEQ ID NO: 79414 - RNA, 19 nt, Artificial Sequence
  Chemically synthesized
caaaaaaaccuucuaaugc

SEQ ID NO: 79415 - RNA, 19 nt, Artificial Sequence
  Chemically synthesized
ugaucaguaggcaaguuuu

SEQ ID NO: 79416 - RNA, 19 nt, Artificial Sequence
  Chemically synthesized
uguucugcuuuacgcaucu

SEQ ID NO: 79417 - RNA, 19 nt, Artificial Sequence
  Chemically synthesized
cuaacugcagaagcuaccg

SEQ ID NO: 79418 - RNA, 19 nt, Artificial Sequence
  Chemically synthesized
aaugugagucugaacucuu

SEQ ID NO: 79419 - RNA, 19 nt, Artificial Sequence
  Chemically synthesized
uuacagcaccaaucuccuu

SEQ ID NO: 79420 - RNA, 19 nt, Artificial Sequence
  Chemically synthesized
gaucgugucuuuaucaucc

SEQ ID NO: 79421 - RNA, 19 nt, Artificial Sequence
  Chemically synthesized
uuaucaucccuaagaucaa

SEQ ID NO: 79422 - RNA, 19 nt, Artificial Sequence
  Chemically synthesized
ucauaaucuucuuguccag

SEQ ID NO: 79423 - RNA, 19 nt, Artificial Sequence
  Chemically synthesized
agcuguaucccauaagccc

SEQ ID NO: 79424 - RNA, 19 nt, Artificial Sequence
  Chemically synthesized
uuccaucuaccauaacauu

SEQ ID NO: 79425 - RNA, 19 nt, Artificial Sequence
  Chemically synthesized
cuuuguccuuugaucacac

SEQ ID NO: 79426 - RNA, 19 nt, Artificial Sequence
  Chemically synthesized
acaacagcaggcauuuucu

SEQ ID NO: 79427 - RNA, 19 nt, Artificial Sequence
  Chemically synthesized
accaaucuccuuagccaug

SEQ ID NO: 79428 - RNA, 19 nt, Artificial Sequence
  Chemically synthesized
ucgugucuuuaucaucccu

SEQ ID NO: 79429 - RNA, 19 nt, Artificial Sequence
  Chemically synthesized
ucccauaagcccagauuca

SEQ ID NO: 79430 - RNA, 19 nt, Artificial Sequence
  Chemically synthesized
uguaaaaacacuccacaau

SEQ ID NO: 79431 - RNA, 19 nt, Artificial Sequence
  Chemically synthesized
auauauucuccaggaaaug

SEQ ID NO: 79432 - RNA, 19 nt, Artificial Sequence
  Chemically synthesized
ucacagacccaaaggaaca

SEQ ID NO: 79433 - RNA, 19 nt, Artificial Sequence
  Chemically synthesized
agagggucaguauugguca

SEQ ID NO: 79434 - RNA, 19 nt, Artificial Sequence
  Chemically synthesized
uaagagaaaggaaaagcuu

SEQ ID NO: 79435 - RNA, 19 nt, Artificial Sequence
  Chemically synthesized
ugcaaaguucagugcucgg

SEQ ID NO: 79436 - RNA, 19 nt, Artificial Sequence
  Chemically synthesized
agaaacaggaaauggccgc

SEQ ID NO: 79437 - RNA, 19 nt, Artificial Sequence
  Chemically synthesized
ccagauucaccgguuuucc

SEQ ID NO: 79438 - RNA, 19 nt, Artificial Sequence
  Chemically synthesized
agggucaguauuggucaag

SEQ ID NO: 79439 - RNA, 19 nt, Artificial Sequence
  Chemically synthesized
ugacagugucgguaaucug

SEQ ID NO: 79440 - RNA, 19 nt, Artificial Sequence
  Chemically synthesized
cuaaucgacaaaaaaaccu

SEQ ID NO: 79441 - RNA, 19 nt, Artificial Sequence
  Chemically synthesized
aaccuucuaaugcauuauc

SEQ ID NO: 79442 - RNA, 19 nt, Artificial Sequence
  Chemically synthesized
acaaggaggcauauugcuc

SEQ ID NO: 79443 - RNA, 19 nt, Artificial Sequence
  Chemically synthesized
acuaacagaacaaccaguu

SEQ ID NO: 79444 - RNA, 19 nt, Artificial Sequence
  Chemically synthesized
uaacagaacaaccaguuua

SEQ ID NO: 79445 - RNA, 19 nt, Artificial Sequence
  Chemically synthesized
ucuucauuagaggaaauag

SEQ ID NO: 79446 - RNA, 19 nt, Artificial Sequence
  Chemically synthesized
uccauuacaguacaauguu

SEQ ID NO: 79447 - RNA, 19 nt, Artificial Sequence
  Chemically synthesized
uguaguucagaagguauuu

SEQ ID NO: 79448 - RNA, 19 nt, Artificial Sequence
  Chemically synthesized
cuuaaucugaacaagaaug

SEQ ID NO: 79449 - RNA, 19 nt, Artificial Sequence
  Chemically synthesized
uaacaaaaaguuggcauug

SEQ ID NO: 79450 - RNA, 19 nt, Artificial Sequence
  Chemically synthesized
aacacugucuugaggccuc

SEQ ID NO: 79451 - RNA, 19 nt, Artificial Sequence
  Chemically synthesized
ucaagugacagugucggua

SEQ ID NO: 79452 - RNA, 19 nt, Artificial Sequence
  Chemically synthesized
auaaaguaacauggaaagc

SEQ ID NO: 79453 - RNA, 19 nt, Artificial Sequence
  Chemically synthesized
aaagcacuuacuaaguuag

SEQ ID NO: 79454 - RNA, 19 nt, Artificial Sequence
  Chemically synthesized
agugucugcaccuccuaac

SEQ ID NO: 79455 - RNA, 19 nt, Artificial Sequence
  Chemically synthesized
uaaucugaacaagaauggg

SEQ ID NO: 79456 - RNA, 19 nt, Artificial Sequence
  Chemically synthesized
cucuuccucuucuucacgg

SEQ ID NO: 79457 - RNA, 19 nt, Artificial Sequence
  Chemically synthesized
acuuugcacggacauuuuc

SEQ ID NO: 79458 - RNA, 19 nt, Artificial Sequence
  Chemically synthesized
cauaaucuucuuguccagc

SEQ ID NO: 79459 - RNA, 19 nt, Artificial Sequence
  Chemically synthesized
caccgguuuuccaucuacc

SEQ ID NO: 79460 - RNA, 19 nt, Artificial Sequence
  Chemically synthesized
ucuccaggaaaugcauugg

SEQ ID NO: 79461 - RNA, 19 nt, Artificial Sequence
  Chemically synthesized
acuauaaagcugcaacaca

SEQ ID NO: 79462 - RNA, 19 nt, Artificial Sequence
  Chemically synthesized
uagcgacuaacagaacaac

SEQ ID NO: 79463 - RNA, 19 nt, Artificial Sequence
  Chemically synthesized
gauaauaccaaccuuucuu

SEQ ID NO: 79464 - RNA, 19 nt, Artificial Sequence
  Chemically synthesized
acaauguaguguaaaucuc

SEQ ID NO: 79465 - RNA, 19 nt, Artificial Sequence
  Chemically synthesized
gcaaguuuuaccuacagcu

SEQ ID NO: 79466 - RNA, 19 nt, Artificial Sequence
  Chemically synthesized
auagcaguucuguucaaaa

SEQ ID NO: 79467 - RNA, 19 nt, Artificial Sequence
  Chemically synthesized
uuuacgcaucugagaacua

SEQ ID NO: 79468 - RNA, 19 nt, Artificial Sequence
  Chemically synthesized
ugcagaagcuaccgucuuc

SEQ ID NO: 79469 - RNA, 19 nt, Artificial Sequence
  Chemically synthesized
aaacacugucuugaggccu

SEQ ID NO: 79470 - RNA, 19 nt, Artificial Sequence
  Chemically synthesized
ugggagucagcuucuucuc

SEQ ID NO: 79471 - RNA, 19 nt, Artificial Sequence
  Chemically synthesized
ucagcuucuucuccuucag

SEQ ID NO: 79472 - RNA, 19 nt, Artificial Sequence
  Chemically synthesized
accucaggauaccacuuug

SEQ ID NO: 79473 - RNA, 19 nt, Artificial Sequence
  Chemically synthesized
uaccacuuugcacggacau

SEQ ID NO: 79474 - RNA, 19 nt, Artificial Sequence
  Chemically synthesized
aaugaugcaggacucacaa

SEQ ID NO: 79475 - RNA, 19 nt, Artificial Sequence
  Chemically synthesized
ucacaagggaaaagcaaau

SEQ ID NO: 79476 - RNA, 19 nt, Artificial Sequence
  Chemically synthesized
cuauaagaaaagcacuuac

SEQ ID NO: 79477 - RNA, 19 nt, Artificial Sequence
  Chemically synthesized
cuaaguuagcgacuaacag

SEQ ID NO: 79478 - RNA, 19 nt, Artificial Sequence
  Chemically synthesized
uggcagguguaagagaaag

SEQ ID NO: 79479 - RNA, 19 nt, Artificial Sequence
  Chemically synthesized
aaacaggaaauggccgcuc

SEQ ID NO: 79480 - RNA, 19 nt, Artificial Sequence
  Chemically synthesized
uaguguaaaucuccacuuc

SEQ ID NO: 79481 - RNA, 19 nt, Artificial Sequence
  Chemically synthesized
aggcuguucugcuuuacgc

SEQ ID NO: 79482 - RNA, 19 nt, Artificial Sequence
  Chemically synthesized
cuguucugcuuuacgcauc

SEQ ID NO: 79483 - RNA, 19 nt, Artificial Sequence
  Chemically synthesized
aguucagugcucgguguuc

SEQ ID NO: 79484 - RNA, 19 nt, Artificial Sequence
  Chemically synthesized
guucagugcucgguguucu

SEQ ID NO: 79485 - RNA, 19 nt, Artificial Sequence
  Chemically synthesized
cagagaaacaggaaauggc

SEQ ID NO: 79486 - RNA, 19 nt, Artificial Sequence
  Chemically synthesized
acagcaggcauuuucucuu

SEQ ID NO: 79487 - RNA, 19 nt, Artificial Sequence
  Chemically synthesized
gucuuuaucaucccuaaga

SEQ ID NO: 79488 - RNA, 19 nt, Artificial Sequence
  Chemically synthesized
ucuuuaucaucccuaagau

SEQ ID NO: 79489 - RNA, 19 nt, Artificial Sequence
  Chemically synthesized
caaagcugaggaaaacugc

SEQ ID NO: 79490 - RNA, 19 nt, Artificial Sequence
  Chemically synthesized
gucauaaucuucuugucca

SEQ ID NO: 79491 - RNA, 19 nt, Artificial Sequence
  Chemically synthesized
auugucaaagacaguaggg

SEQ ID NO: 79492 - RNA, 19 nt, Artificial Sequence
  Chemically synthesized
uugucaaagacaguaggga

SEQ ID NO: 79493 - RNA, 19 nt, Artificial Sequence
  Chemically synthesized
cacaguuuacagaaccuca

SEQ ID NO: 79494 - RNA, 19 nt, Artificial Sequence
  Chemically synthesized
guaaucuggcaagacagug

SEQ ID NO: 79495 - RNA, 19 nt, Artificial Sequence
  Chemically synthesized
ugcauugguuguguaacug

SEQ ID NO: 79496 - RNA, 19 nt, Artificial Sequence
  Chemically synthesized
aguaacauggaaagcacuu

SEQ ID NO: 79497 - RNA, 19 nt, Artificial Sequence
  Chemically synthesized
aagcacuuacuaaguuagc

SEQ ID NO: 79498 - RNA, 19 nt, Artificial Sequence
  Chemically synthesized
cucacuggugaguucaaug

SEQ ID NO: 79499 - RNA, 19 nt, Artificial Sequence
  Chemically synthesized
aacuacauaggagagcaag

SEQ ID NO: 79500 - RNA, 19 nt, Artificial Sequence
  Chemically synthesized
agguauuuuggcaacucuu

SEQ ID NO: 79501 - RNA, 19 nt, Artificial Sequence
  Chemically synthesized
agucugaacucuuacauuu

SEQ ID NO: 79502 - RNA, 19 nt, Artificial Sequence
  Chemically synthesized
ucggaucgcuucgucaaac

SEQ ID NO: 79503 - RNA, 19 nt, Artificial Sequence
  Chemically synthesized
ucgaucgugucuuuaucau

SEQ ID NO: 79504 - RNA, 19 nt, Artificial Sequence
  Chemically synthesized
ucuguuguaguggcugaag

SEQ ID NO: 79505 - RNA, 19 nt, Artificial Sequence
  Chemically synthesized
uucucgccagugaguuaag

SEQ ID NO: 79506 - RNA, 19 nt, Artificial Sequence
  Chemically synthesized
gagguaaagagggucagua

SEQ ID NO: 79507 - RNA, 19 nt, Artificial Sequence
  Chemically synthesized
aguauuggucaagugacag

SEQ ID NO: 79508 - RNA, 19 nt, Artificial Sequence
  Chemically synthesized
aaagcacuuauuagcucug

SEQ ID NO: 79509 - RNA, 19 nt, Artificial Sequence
  Chemically synthesized
ccugauaauaccaaccuuu

SEQ ID NO: 79510 - RNA, 19 nt, Artificial Sequence
  Chemically synthesized
caaccuuucuuucaucauc

SEQ ID NO: 79511 - RNA, 19 nt, Artificial Sequence
  Chemically synthesized
aaaauacugucuuuguccu

SEQ ID NO: 79512 - RNA, 19 nt, Artificial Sequence
  Chemically synthesized
uacaaagguuccaagggac

SEQ ID NO: 79513 - RNA, 19 nt, Artificial Sequence
  Chemically synthesized
cacuccagguauuuuacag

SEQ ID NO: 79514 - RNA, 19 nt, Artificial Sequence
  Chemically synthesized
cgugucuuuaucaucccua

SEQ ID NO: 79515 - RNA, 19 nt, Artificial Sequence
  Chemically synthesized
ccacuuugcacggacauuu

SEQ ID NO: 79516 - RNA, 19 nt, Artificial Sequence
  Chemically synthesized
cauuuucaaaugaugcagg

SEQ ID NO: 79517 - RNA, 19 nt, Artificial Sequence
  Chemically synthesized
cuguaucccauaagcccag

SEQ ID NO: 79518 - RNA, 19 nt, Artificial Sequence
  Chemically synthesized
aggcaaagcgacuacagga

SEQ ID NO: 79519 - RNA, 19 nt, Artificial Sequence
  Chemically synthesized
aaacuauaaagcugcaaca

SEQ ID NO: 79520 - RNA, 19 nt, Artificial Sequence
  Chemically synthesized
acauggaaagcacuuuuac

SEQ ID NO: 79521 - RNA, 19 nt, Artificial Sequence
  Chemically synthesized
uaauacaaggaggcauauu

SEQ ID NO: 79522 - RNA, 19 nt, Artificial Sequence
  Chemically synthesized
acuuacuaaguuagcgacu

SEQ ID NO: 79523 - RNA, 19 nt, Artificial Sequence
  Chemically synthesized
cugaucaguaggcaaguuu

SEQ ID NO: 79524 - RNA, 19 nt, Artificial Sequence
  Chemically synthesized
uacugcauuugacagaaau

SEQ ID NO: 79525 - RNA, 19 nt, Artificial Sequence
  Chemically synthesized
agaguuuuuacccgugaca

SEQ ID NO: 79526 - RNA, 19 nt, Artificial Sequence
  Chemically synthesized
agacugauccaaagagcug

SEQ ID NO: 79527 - RNA, 19 nt, Artificial Sequence
  Chemically synthesized
gaacacgugcugcuaacuc

SEQ ID NO: 79528 - RNA, 19 nt, Artificial Sequence
  Chemically synthesized
cugagaacuacauaggaga

SEQ ID NO: 79529 - RNA, 19 nt, Artificial Sequence
  Chemically synthesized
acuacauaggagagcaagu

SEQ ID NO: 79530 - RNA, 19 nt, Artificial Sequence
  Chemically synthesized
agaaggcuugucauuuuag

SEQ ID NO: 79531 - RNA, 19 nt, Artificial Sequence
  Chemically synthesized
aaaaguuggcauugagugc

SEQ ID NO: 79532 - RNA, 19 nt, Artificial Sequence
  Chemically synthesized
uuacaacagcaggcauuuu

SEQ ID NO: 79533 - RNA, 19 nt, Artificial Sequence
  Chemically synthesized
gaugggagucagcuucuuc

SEQ ID NO: 79534 - RNA, 19 nt, Artificial Sequence
  Chemically synthesized
ucaaaugaugcaggacuca

SEQ ID NO: 79535 - RNA, 19 nt, Artificial Sequence
  Chemically synthesized
ccacaauucugcaacuguc

SEQ ID NO: 79536 - RNA, 19 nt, Artificial Sequence
  Chemically synthesized
ucgguaaucuggcaagaca

SEQ ID NO: 79537 - RNA, 19 nt, Artificial Sequence
  Chemically synthesized
aaagcugcaacacaugauu

SEQ ID NO: 79538 - RNA, 19 nt, Artificial Sequence
  Chemically synthesized
aaaguaacauggaaagcac

SEQ ID NO: 79539 - RNA, 19 nt, Artificial Sequence
  Chemically synthesized
ucgacaaaaaaaccuucua

SEQ ID NO: 79540 - RNA, 19 nt, Artificial Sequence
  Chemically synthesized
cuucuaaugcauuaucaga

SEQ ID NO: 79541 - RNA, 19 nt, Artificial Sequence
  Chemically synthesized
aagagaaaggaaaagcuua

SEQ ID NO: 79542 - RNA, 19 nt, Artificial Sequence
  Chemically synthesized
uccugauaauaccaaccuu

SEQ ID NO: 79543 - RNA, 19 nt, Artificial Sequence
  Chemically synthesized
uaggcaaguuuuaccuaca

SEQ ID NO: 79544 - RNA, 19 nt, Artificial Sequence
  Chemically synthesized
cuacgcucacuccauuaca

SEQ ID NO: 79545 - RNA, 19 nt, Artificial Sequence
  Chemically synthesized
ugcugcuaacucacuggug

SEQ ID NO: 79546 - RNA, 19 nt, Artificial Sequence
  Chemically synthesized
acugcagaagcuaccgucu

SEQ ID NO: 79547 - RNA, 19 nt, Artificial Sequence
  Chemically synthesized
cucggcacaacaaugcagu

SEQ ID NO: 79548 - RNA, 19 nt, Artificial Sequence
  Chemically synthesized
auagaaugugagucugaac

SEQ ID NO: 79549 - RNA, 19 nt, Artificial Sequence
  Chemically synthesized
ugagucugaacucuuacau

SEQ ID NO: 79550 - RNA, 19 nt, Artificial Sequence
  Chemically synthesized
caaaugaugcaggacucac

SEQ ID NO: 79551 - RNA, 19 nt, Artificial Sequence
  Chemically synthesized
aagggaaaagcaaauuaag

SEQ ID NO: 79552 - RNA, 19 nt, Artificial Sequence
  Chemically synthesized
cccagauucaccgguuuuc

SEQ ID NO: 79553 - RNA, 19 nt, Artificial Sequence
  Chemically synthesized
aucuaccauaacauuggca

SEQ ID NO: 79554 - RNA, 19 nt, Artificial Sequence
  Chemically synthesized
aggaaaacugcagagaaac

SEQ ID NO: 79555 - RNA, 19 nt, Artificial Sequence
  Chemically synthesized
guaaaaacacuccacaauu

SEQ ID NO: 79556 - RNA, 19 nt, Artificial Sequence
  Chemically synthesized
ugaguuaaguuguacagaa

SEQ ID NO: 79557 - RNA, 19 nt, Artificial Sequence
  Chemically synthesized
aaaacugcagagaaacagg

SEQ ID NO: 79558 - RNA, 19 nt, Artificial Sequence
  Chemically synthesized
cuauaaagcugcaacacau

SEQ ID NO: 79559 - RNA, 19 nt, Artificial Sequence
  Chemically synthesized
aaaacuaaggaaagcacuu

SEQ ID NO: 79560 - RNA, 19 nt, Artificial Sequence
  Chemically synthesized
ccuuucuuucaucaucuac

SEQ ID NO: 79561 - RNA, 19 nt, Artificial Sequence
  Chemically synthesized
aguuuuuacccgugacacu

SEQ ID NO: 79562 - RNA, 19 nt, Artificial Sequence
  Chemically synthesized
caaguuuuaccuacagcuc

SEQ ID NO: 79563 - RNA, 19 nt, Artificial Sequence
  Chemically synthesized
uacugucuuuguccuuuga

SEQ ID NO: 79564 - RNA, 19 nt, Artificial Sequence
  Chemically synthesized
acugucuuuguccuuugau

SEQ ID NO: 79565 - RNA, 19 nt, Artificial Sequence
  Chemically synthesized
agcaguucuguucaaaauc

SEQ ID NO: 79566 - RNA, 19 nt, Artificial Sequence
  Chemically synthesized
acucgcuaugaaaucacaa

SEQ ID NO: 79567 - RNA, 19 nt, Artificial Sequence
  Chemically synthesized
uggugaguucaauggcaac

SEQ ID NO: 79568 - RNA, 19 nt, Artificial Sequence
  Chemically synthesized
ucugcaccuccuaacugca

SEQ ID NO: 79569 - RNA, 19 nt, Artificial Sequence
  Chemically synthesized
agcuaccgucuucucaaag

SEQ ID NO: 79570 - RNA, 19 nt, Artificial Sequence
  Chemically synthesized
uguaacaaaaaguuggcau

SEQ ID NO: 79571 - RNA, 19 nt, Artificial Sequence
  Chemically synthesized
caggcauuuucucuuccuc

SEQ ID NO: 79572 - RNA, 19 nt, Artificial Sequence
  Chemically synthesized
cgcuucgucaaacacuguc

SEQ ID NO: 79573 - RNA, 19 nt, Artificial Sequence
  Chemically synthesized
cucgaucgugucuuuauca

SEQ ID NO: 79574 - RNA, 19 nt, Artificial Sequence
  Chemically synthesized
ccucaggauaccacuuugc

SEQ ID NO: 79575 - RNA, 19 nt, Artificial Sequence
  Chemically synthesized
aggauaccacuuugcacgg

SEQ ID NO: 79576 - RNA, 19 nt, Artificial Sequence
  Chemically synthesized
augaugcaggacucacaag

SEQ ID NO: 79577 - RNA, 19 nt, Artificial Sequence
  Chemically synthesized
uaccauaacauuggcagaa

SEQ ID NO: 79578 - RNA, 19 nt, Artificial Sequence
  Chemically synthesized
auguaaaaacacuccacaa

SEQ ID NO: 79579 - RNA, 19 nt, Artificial Sequence
  Chemically synthesized
cacuccacaauucugcaac

SEQ ID NO: 79580 - RNA, 19 nt, Artificial Sequence
  Chemically synthesized
acuagcacaguuuacagaa

SEQ ID NO: 79581 - RNA, 19 nt, Artificial Sequence
  Chemically synthesized
agguaaagagggucaguau

SEQ ID NO: 79582 - RNA, 19 nt, Artificial Sequence
  Chemically synthesized
uguuaagaagguucauagu

SEQ ID NO: 79583 - RNA, 19 nt, Artificial Sequence
  Chemically synthesized
acuagaaaacuaaggaaag

SEQ ID NO: 79584 - RNA, 19 nt, Artificial Sequence
  Chemically synthesized
uggaaagcacuuuuacuaa

SEQ ID NO: 79585 - RNA, 19 nt, Artificial Sequence
  Chemically synthesized
accuucuaaugcauuauca

SEQ ID NO: 79586 - RNA, 19 nt, Artificial Sequence
  Chemically synthesized
uuacuaaguuagcgacuaa

SEQ ID NO: 79587 - RNA, 19 nt, Artificial Sequence
  Chemically synthesized
acauuuccugauaauacca

SEQ ID NO: 79588 - RNA, 19 nt, Artificial Sequence
  Chemically synthesized
uacccgugacacuuucauu

SEQ ID NO: 79589 - RNA, 19 nt, Artificial Sequence
  Chemically synthesized
cuaugaaaucacaaagacu

SEQ ID NO: 79590 - RNA, 19 nt, Artificial Sequence
  Chemically synthesized
agagcaagugucugcaccu

SEQ ID NO: 79591 - RNA, 19 nt, Artificial Sequence
  Chemically synthesized
ucagaagguauuuuggcaa

SEQ ID NO: 79592 - RNA, 19 nt, Artificial Sequence
  Chemically synthesized
acaaaaaguuggcauugag

SEQ ID NO: 79593 - RNA, 19 nt, Artificial Sequence
  Chemically synthesized
ucgcuucgucaaacacugu

SEQ ID NO: 79594 - RNA, 19 nt, Artificial Sequence
  Chemically synthesized
cucaggauaccacuuugca

SEQ ID NO: 79595 - RNA, 19 nt, Artificial Sequence
  Chemically synthesized
uucuguuguaguggcugaa

SEQ ID NO: 79596 - RNA, 19 nt, Artificial Sequence
  Chemically synthesized
uauucuccaggaaaugcau

SEQ ID NO: 79597 - RNA, 19 nt, Artificial Sequence
  Chemically synthesized
acaucaauaggcaaagcga

SEQ ID NO: 79598 - RNA, 19 nt, Artificial Sequence
  Chemically synthesized
cauggaaagcacuuuuacu

SEQ ID NO: 79599 - RNA, 19 nt, Artificial Sequence
  Chemically synthesized
aaauacugucuuuguccuu

SEQ ID NO: 79600 - RNA, 19 nt, Artificial Sequence
  Chemically synthesized
acgcucacuccauuacagu

SEQ ID NO: 79601 - RNA, 19 nt, Artificial Sequence
  Chemically synthesized
guucaauggcaacgcuuca

SEQ ID NO: 79602 - RNA, 19 nt, Artificial Sequence
  Chemically synthesized
cuuuacgcaucugagaacu

SEQ ID NO: 79603 - RNA, 19 nt, Artificial Sequence
  Chemically synthesized
gcaucugagaacuacauag

SEQ ID NO: 79604 - RNA, 19 nt, Artificial Sequence
  Chemically synthesized
agaagcuaccgucuucuca

SEQ ID NO: 79605 - RNA, 19 nt, Artificial Sequence
  Chemically synthesized
gcauuuucucuuccucuuc

SEQ ID NO: 79606 - RNA, 19 nt, Artificial Sequence
  Chemically synthesized
accaccacacacuugaugg

SEQ ID NO: 79607 - RNA, 19 nt, Artificial Sequence
  Chemically synthesized
acacacuugauggccugca

SEQ ID NO: 79608 - RNA, 19 nt, Artificial Sequence
  Chemically synthesized
auaccacuuugcacggaca

SEQ ID NO: 79609 - RNA, 19 nt, Artificial Sequence
  Chemically synthesized
aaucuucuuguccagcugu

SEQ ID NO: 79610 - RNA, 19 nt, Artificial Sequence
  Chemically synthesized
uguccagcuguaucccaua

SEQ ID NO: 79611 - RNA, 19 nt, Artificial Sequence
  Chemically synthesized
ugaggaaaacugcagagaa

SEQ ID NO: 79612 - RNA, 19 nt, Artificial Sequence
  Chemically synthesized
ucaaagacaguagggauau

SEQ ID NO: 79613 - RNA, 19 nt, Artificial Sequence
  Chemically synthesized
aagacaguagggauauauu

SEQ ID NO: 79614 - RNA, 19 nt, Artificial Sequence
  Chemically synthesized
gacaguagggauauauucu

SEQ ID NO: 79615 - RNA, 19 nt, Artificial Sequence
  Chemically synthesized
aguagggauauauucucca

SEQ ID NO: 79616 - RNA, 19 nt, Artificial Sequence
  Chemically synthesized
acaucgucagcacuagcac

SEQ ID NO: 79617 - RNA, 19 nt, Artificial Sequence
  Chemically synthesized
acagacccaaaggaacauc

SEQ ID NO: 79618 - RNA, 19 nt, Artificial Sequence
  Chemically synthesized
gucaguauuggucaaguga

SEQ ID NO: 79619 - RNA, 19 nt, Artificial Sequence
  Chemically synthesized
aacuauaaagcugcaacac

SEQ ID NO: 79620 - RNA, 19 nt, Artificial Sequence
  Chemically synthesized
aaguuagcgacuaacagaa

SEQ ID NO: 79621 - RNA, 19 nt, Artificial Sequence
  Chemically synthesized
ucuacugcauuugacagaa

SEQ ID NO: 79622 - RNA, 19 nt, Artificial Sequence
  Chemically synthesized
gaguuuuuacccgugacac

SEQ ID NO: 79623 - RNA, 19 nt, Artificial Sequence
  Chemically synthesized
ugaaaucacaaagacugau

SEQ ID NO: 79624 - RNA, 19 nt, Artificial Sequence
  Chemically synthesized
ugagaacuacauaggagag

SEQ ID NO: 79625 - RNA, 19 nt, Artificial Sequence
  Chemically synthesized
agcguacaaagguuccaag

SEQ ID NO: 79626 - RNA, 19 nt, Artificial Sequence
  Chemically synthesized
aauugucaaagacaguagg

SEQ ID NO: 79627 - RNA, 19 nt, Artificial Sequence
  Chemically synthesized
uauucucgccagugaguua

SEQ ID NO: 79628 - RNA, 19 nt, Artificial Sequence
  Chemically synthesized
aguuguacagaacaucguc

SEQ ID NO: 79629 - RNA, 19 nt, Artificial Sequence
  Chemically synthesized
ucgucagcacuagcacagu

SEQ ID NO: 79630 - RNA, 19 nt, Artificial Sequence
  Chemically synthesized
acccaaaggaacaucaaua

SEQ ID NO: 79631 - RNA, 19 nt, Artificial Sequence
  Chemically synthesized
uuacaccuaguuacuagaa

SEQ ID NO: 79632 - RNA, 19 nt, Artificial Sequence
  Chemically synthesized
guucuauaagaaaagcacu

SEQ ID NO: 79633 - RNA, 19 nt, Artificial Sequence
  Chemically synthesized
cuuucauuccuuguacaau

SEQ ID NO: 79634 - RNA, 19 nt, Artificial Sequence
  Chemically synthesized
guaaaucuccacuucguau

SEQ ID NO: 79635 - RNA, 19 nt, Artificial Sequence
  Chemically synthesized
ucagaaaacucgcuaugaa

SEQ ID NO: 79636 - RNA, 19 nt, Artificial Sequence
  Chemically synthesized
ugcaccuccuaacugcaga

SEQ ID NO: 79637 - RNA, 19 nt, Artificial Sequence
  Chemically synthesized
aguguaguucagaagguau

SEQ ID NO: 79638 - RNA, 19 nt, Artificial Sequence
  Chemically synthesized
ugucauuuuagggcuaaau

SEQ ID NO: 79639 - RNA, 19 nt, Artificial Sequence
  Chemically synthesized
agcacuccagguauuuuac

SEQ ID NO: 79640 - RNA, 19 nt, Artificial Sequence
  Chemically synthesized
ugaugggaguguugggaca

SEQ ID NO: 79641 - RNA, 19 nt, Artificial Sequence
  Chemically synthesized
ugcaggacucacaagggaa

SEQ ID NO: 79642 - RNA, 19 nt, Artificial Sequence
  Chemically synthesized
ucuucuuguccagcuguau

SEQ ID NO: 79643 - RNA, 19 nt, Artificial Sequence
  Chemically synthesized
agauucaccgguuuuccau

SEQ ID NO: 79644 - RNA, 19 nt, Artificial Sequence
  Chemically synthesized
uguauucucgccagugagu

SEQ ID NO: 79645 - RNA, 19 nt, Artificial Sequence
  Chemically synthesized
cagugaguuaaguuguaca

SEQ ID NO: 79646 - RNA, 19 nt, Artificial Sequence
  Chemically synthesized
cagaacaucgucagcacua

SEQ ID NO: 79647 - RNA, 19 nt, Artificial Sequence
  Chemically synthesized
augcauugguuguguaacu

SEQ ID NO: 79648 - RNA, 19 nt, Artificial Sequence
  Chemically synthesized
acagcuaaacagaauucuu

SEQ ID NO: 79649 - RNA, 19 nt, Artificial Sequence
  Chemically synthesized
aagugucugcaccuccuaa

SEQ ID NO: 79650 - RNA, 19 nt, Artificial Sequence
  Chemically synthesized
guauuuuggcaacucuuaa

SEQ ID NO: 79651 - RNA, 19 nt, Artificial Sequence
  Chemically synthesized
uugucauuuuagggcuaaa

SEQ ID NO: 79652 - RNA, 19 nt, Artificial Sequence
  Chemically synthesized
agcuucuucuccuucaguu

SEQ ID NO: 79653 - RNA, 19 nt, Artificial Sequence
  Chemically synthesized
ucuccuucaguuucucgau

SEQ ID NO: 79654 - RNA, 19 nt, Artificial Sequence
  Chemically synthesized
aagcugaggaaaacugcag

SEQ ID NO: 79655 - RNA, 19 nt, Artificial Sequence
  Chemically synthesized
gauucaccgguuuuccauc

SEQ ID NO: 79656 - RNA, 19 nt, Artificial Sequence
  Chemically synthesized
auucugcaacugucaauuu

SEQ ID NO: 79657 - RNA, 19 nt, Artificial Sequence
  Chemically synthesized
ucagcacuagcacaguuua

SEQ ID NO: 79658 - RNA, 19 nt, Artificial Sequence
  Chemically synthesized
cucacagacccaaaggaac

SEQ ID NO: 79659 - RNA, 19 nt, Artificial Sequence
  Chemically synthesized
caucaauaggcaaagcgac

SEQ ID NO: 79660 - RNA, 19 nt, Artificial Sequence
  Chemically synthesized
gguaaagagggucaguauu

SEQ ID NO: 79661 - RNA, 19 nt, Artificial Sequence
  Chemically synthesized
ugguuguguaacugaucag

SEQ ID NO: 79662 - RNA, 19 nt, Artificial Sequence
  Chemically synthesized
aacauggaaagcacuuuua

SEQ ID NO: 79663 - RNA, 19 nt, Artificial Sequence
  Chemically synthesized
acuaaguuagcgacuaaca

SEQ ID NO: 79664 - RNA, 19 nt, Artificial Sequence
  Chemically synthesized
ucauuccuuguacaaugua

SEQ ID NO: 79665 - RNA, 19 nt, Artificial Sequence
  Chemically synthesized
ccuuguacaauguagugua

SEQ ID NO: 79666 - RNA, 19 nt, Artificial Sequence
  Chemically synthesized
gucuuuguccuuugaucac

SEQ ID NO: 79667 - RNA, 19 nt, Artificial Sequence
  Chemically synthesized
acacccacagcuaaacaga

SEQ ID NO: 79668 - RNA, 19 nt, Artificial Sequence
  Chemically synthesized
ugcagagaaacaggaaaug

SEQ ID NO: 79669 - RNA, 19 nt, Artificial Sequence
  Chemically synthesized
ucggcacaacaaugcagug

SEQ ID NO: 79670 - RNA, 19 nt, Artificial Sequence
  Chemically synthesized
caaaaaguuggcauugagu

SEQ ID NO: 79671 - RNA, 19 nt, Artificial Sequence
  Chemically synthesized
ucuccuuagccauggcuag

SEQ ID NO: 79672 - RNA, 19 nt, Artificial Sequence
  Chemically synthesized
augggaguguugggacagu

SEQ ID NO: 79673 - RNA, 19 nt, Artificial Sequence
  Chemically synthesized
agggaaaagcaaauuaaga

SEQ ID NO: 79674 - RNA, 19 nt, Artificial Sequence
  Chemically synthesized
cacaauucugcaacuguca

SEQ ID NO: 79675 - RNA, 19 nt, Artificial Sequence
  Chemically synthesized
aucuggcaagacagugaug

SEQ ID NO: 79676 - RNA, 19 nt, Artificial Sequence
  Chemically synthesized
aaguaacauggaaagcacu

SEQ ID NO: 79677 - RNA, 19 nt, Artificial Sequence
  Chemically synthesized
aggcauauugcucagucag

SEQ ID NO: 79678 - RNA, 19 nt, Artificial Sequence
  Chemically synthesized
agaaaagcacuuacuaagu

SEQ ID NO: 79679 - RNA, 19 nt, Artificial Sequence
  Chemically synthesized
cagaacaaccaguuuaaag

SEQ ID NO: 79680 - RNA, 19 nt, Artificial Sequence
  Chemically synthesized
gucaaaauacugucuuugu

SEQ ID NO: 79681 - RNA, 19 nt, Artificial Sequence
  Chemically synthesized
agaaaacucgcuaugaaau

SEQ ID NO: 79682 - RNA, 19 nt, Artificial Sequence
  Chemically synthesized
ugcuuuacgcaucugagaa

SEQ ID NO: 79683 - RNA, 19 nt, Artificial Sequence
  Chemically synthesized
aucuccuuagccauggcua

SEQ ID NO: 79684 - RNA, 19 nt, Artificial Sequence
  Chemically synthesized
cgaucgugucuuuaucauc

SEQ ID NO: 79685 - RNA, 19 nt, Artificial Sequence
  Chemically synthesized
aagggucccacgcuguauu

SEQ ID NO: 79686 - RNA, 19 nt, Artificial Sequence
  Chemically synthesized
gucagcacuagcacaguuu

SEQ ID NO: 79687 - RNA, 19 nt, Artificial Sequence
  Chemically synthesized
gcacaguuuacagaaccuc

SEQ ID NO: 79688 - RNA, 19 nt, Artificial Sequence
  Chemically synthesized
uggcaagacagugauguua

SEQ ID NO: 79689 - RNA, 19 nt, Artificial Sequence
  Chemically synthesized
caugauuuuuacaccuagu

SEQ ID NO: 79690 - RNA, 19 nt, Artificial Sequence
  Chemically synthesized
accuaguuacuagaaaacu

SEQ ID NO: 79691 - RNA, 19 nt, Artificial Sequence
  Chemically synthesized
gaaagcacuuuuacuaauc

SEQ ID NO: 79692 - RNA, 19 nt, Artificial Sequence
  Chemically synthesized
agcacuuacuaaguuagcg

SEQ ID NO: 79693 - RNA, 19 nt, Artificial Sequence
  Chemically synthesized
gaauuaaaugcccaauuug

SEQ ID NO: 79694 - RNA, 19 nt, Artificial Sequence
  Chemically synthesized
cccgugacacuuucauucc

SEQ ID NO: 79695 - RNA, 19 nt, Artificial Sequence
  Chemically synthesized
acaauguuaugucgggaac

SEQ ID NO: 79696 - RNA, 19 nt, Artificial Sequence
  Chemically synthesized
caauggcaacgcuucauuc

SEQ ID NO: 79697 - RNA, 19 nt, Artificial Sequence
  Chemically synthesized
ucucaaagacgaaggucuu

SEQ ID NO: 79698 - RNA, 19 nt, Artificial Sequence
  Chemically synthesized
acaacaaugcaguguaguu

SEQ ID NO: 79699 - RNA, 19 nt, Artificial Sequence
  Chemically synthesized
guguaguucagaagguauu

SEQ ID NO: 79700 - RNA, 19 nt, Artificial Sequence
  Chemically synthesized
cguacaaagguuccaaggg

SEQ ID NO: 79701 - RNA, 19 nt, Artificial Sequence
  Chemically synthesized
cagguauuuuacagcacca

SEQ ID NO: 79702 - RNA, 19 nt, Artificial Sequence
  Chemically synthesized
gauaccacuuugcacggac

SEQ ID NO: 79703 - RNA, 19 nt, Artificial Sequence
  Chemically synthesized
aucuucuuguccagcugua

SEQ ID NO: 79704 - RNA, 19 nt, Artificial Sequence
  Chemically synthesized
accgguuuuccaucuacca

SEQ ID NO: 79705 - RNA, 19 nt, Artificial Sequence
  Chemically synthesized
cuccacaauucugcaacug

SEQ ID NO: 79706 - RNA, 19 nt, Artificial Sequence
  Chemically synthesized
acagaacaucgucagcacu

SEQ ID NO: 79707 - RNA, 19 nt, Artificial Sequence
  Chemically synthesized
agcacuagcacaguuuaca

SEQ ID NO: 79708 - RNA, 19 nt, Artificial Sequence
  Chemically synthesized
uacaccuaguuacuagaaa

SEQ ID NO: 79709 - RNA, 19 nt, Artificial Sequence
  Chemically synthesized
acuaaggaaagcacuuauu

SEQ ID NO: 79710 - RNA, 19 nt, Artificial Sequence
  Chemically synthesized
gcacuuuuacuaaucgaca

SEQ ID NO: 79711 - RNA, 19 nt, Artificial Sequence
  Chemically synthesized
agaacaaccaguuuaaaga

SEQ ID NO: 79712 - RNA, 19 nt, Artificial Sequence
  Chemically synthesized
acuuucauuccuuguacaa

SEQ ID NO: 79713 - RNA, 19 nt, Artificial Sequence
  Chemically synthesized
guuaugucgggaacacgug

SEQ ID NO: 79714 - RNA, 19 nt, Artificial Sequence
  Chemically synthesized
ggugaguucaauggcaacg

SEQ ID NO: 79715 - RNA, 19 nt, Artificial Sequence
  Chemically synthesized
cauaggagagcaagugucu

SEQ ID NO: 79716 - RNA, 19 nt, Artificial Sequence
  Chemically synthesized
cuuuaagaaggcuugucau

SEQ ID NO: 79717 - RNA, 19 nt, Artificial Sequence
  Chemically synthesized
gcguacaaagguuccaagg

SEQ ID NO: 79718 - RNA, 19 nt, Artificial Sequence
  Chemically synthesized
uguaucccauaagcccaga

SEQ ID NO: 79719 - RNA, 19 nt, Artificial Sequence
  Chemically synthesized
cccauaagcccagauucac

SEQ ID NO: 79720 - RNA, 19 nt, Artificial Sequence
  Chemically synthesized
ccaucuaccauaacauugg

SEQ ID NO: 79721 - RNA, 19 nt, Artificial Sequence
  Chemically synthesized
guuguaguggcugaagggu

SEQ ID NO: 79722 - RNA, 19 nt, Artificial Sequence
  Chemically synthesized
cuguauucucgccagugag

SEQ ID NO: 79723 - RNA, 19 nt, Artificial Sequence
  Chemically synthesized
aguuaaguuguacagaaca

SEQ ID NO: 79724 - RNA, 19 nt, Artificial Sequence
  Chemically synthesized
gaacaucgucagcacuagc

SEQ ID NO: 79725 - RNA, 19 nt, Artificial Sequence
  Chemically synthesized
cauauugcucagucagaag

SEQ ID NO: 79726 - RNA, 19 nt, Artificial Sequence
  Chemically synthesized
agguguaagagaaaggaaa

SEQ ID NO: 79727 - RNA, 19 nt, Artificial Sequence
  Chemically synthesized
cuguucaaaaucuccgcaa

SEQ ID NO: 79728 - RNA, 19 nt, Artificial Sequence
  Chemically synthesized
gaggcuguucugcuuuacg

SEQ ID NO: 79729 - RNA, 19 nt, Artificial Sequence
  Chemically synthesized
aaguucagugcucgguguu

SEQ ID NO: 79730 - RNA, 19 nt, Artificial Sequence
  Chemically synthesized
aacucuuaaucugaacaag

SEQ ID NO: 79731 - RNA, 19 nt, Artificial Sequence
  Chemically synthesized
ggcugagacauuuacaaca

SEQ ID NO: 79732 - RNA, 19 nt, Artificial Sequence
  Chemically synthesized
cuccuucaguuucucgauc

SEQ ID NO: 79733 - RNA, 19 nt, Artificial Sequence
  Chemically synthesized
agucauacaugcaaaacau

SEQ ID NO: 79734 - RNA, 19 nt, Artificial Sequence
  Chemically synthesized
ugcuaauugcauuagcaaa

SEQ ID NO: 79735 - RNA, 19 nt, Artificial Sequence
  Chemically synthesized
auucuccaggaaaugcauu

SEQ ID NO: 79736 - RNA, 19 nt, Artificial Sequence
  Chemically synthesized
aggaacaucaauaggcaaa

SEQ ID NO: 79737 - RNA, 19 nt, Artificial Sequence
  Chemically synthesized
agugacagugucgguaauc

SEQ ID NO: 79738 - RNA, 19 nt, Artificial Sequence
  Chemically synthesized
aagcugcaacacaugauuu

SEQ ID NO: 79739 - RNA, 19 nt, Artificial Sequence
  Chemically synthesized
aaacugcagagaaacagga

SEQ ID NO: 79740 - RNA, 19 nt, Artificial Sequence
  Chemically synthesized
ccuucuaaugcauuaucag

SEQ ID NO: 79741 - RNA, 19 nt, Artificial Sequence
  Chemically synthesized
gguucuauaagaaaagcac

SEQ ID NO: 79742 - RNA, 19 nt, Artificial Sequence
  Chemically synthesized
aggcauggcagguguaaga

SEQ ID NO: 79743 - RNA, 19 nt, Artificial Sequence
  Chemically synthesized
aggaaaagcuuaagaaaac

SEQ ID NO: 79744 - RNA, 19 nt, Artificial Sequence
  Chemically synthesized
gcauuugacagaaauuaac

SEQ ID NO: 79745 - RNA, 19 nt, Artificial Sequence
  Chemically synthesized
gaaaacucgcuaugaaauc

SEQ ID NO: 79746 - RNA, 19 nt, Artificial Sequence
  Chemically synthesized
acgcaucugagaacuacau

SEQ ID NO: 79747 - RNA, 21 nt, Artificial Sequence
  Chemically synthesized
gguuguucuguuagucgcuaa

SEQ ID NO: 79748 - RNA, 21 nt, Artificial Sequence
  Chemically synthesized
caauacugacccucuuuaccu

SEQ ID NO: 79749 - RNA, 21 nt, Artificial Sequence
  Chemically synthesized
caauguuaugguagauggaaa

SEQ ID NO: 79750 - RNA, 21 nt, Artificial Sequence
  Chemically synthesized
ccgugaagaagaggaagagaa

SEQ ID NO: 79751 - RNA, 21 nt, Artificial Sequence
  Chemically synthesized
cgugaagaagaggaagagaaa

SEQ ID NO: 79752 - RNA, 21 nt, Artificial Sequence
  Chemically synthesized
ggagauuuacacuacauugua

SEQ ID NO: 79753 - RNA, 21 nt, Artificial Sequence
  Chemically synthesized
gaaugaaagugucacggguaa

SEQ ID NO: 79754 - RNA, 21 nt, Artificial Sequence
  Chemically synthesized
gauaaagacacgaucgagaaa

SEQ ID NO: 79755 - RNA, 21 nt, Artificial Sequence
  Chemically synthesized
uaaggagauuggugcuguaaa

SEQ ID NO: 79756 - RNA, 21 nt, Artificial Sequence
  Chemically synthesized
gugucacggguaaaaacucua

SEQ ID NO: 79757 - RNA, 21 nt, Artificial Sequence
  Chemically synthesized
cauuugaaaauguccgugcaa

SEQ ID NO: 79758 - RNA, 21 nt, Artificial Sequence
  Chemically synthesized
ggguaaaaacucuaaaagguu

SEQ ID NO: 79759 - RNA, 21 nt, Artificial Sequence
  Chemically synthesized
ggacaagaagauuaugacaga

SEQ ID NO: 79760 - RNA, 21 nt, Artificial Sequence
  Chemically synthesized
ggugaaucugggcuuauggga

SEQ ID NO: 79761 - RNA, 21 nt, Artificial Sequence
  Chemically synthesized
gaucgagaaacugaaggagaa

SEQ ID NO: 79762 - RNA, 21 nt, Artificial Sequence
  Chemically synthesized
ccgugcaaagugguauccuga

SEQ ID NO: 79763 - RNA, 21 nt, Artificial Sequence
  Chemically synthesized
ggaugauaaagacacgaucga

SEQ ID NO: 79764 - RNA, 21 nt, Artificial Sequence
  Chemically synthesized
ugauaaagacacgaucgagaa

SEQ ID NO: 79765 - RNA, 21 nt, Artificial Sequence
  Chemically synthesized
ggaaugaaagugucacgggua

SEQ ID NO: 79766 - RNA, 21 nt, Artificial Sequence
  Chemically synthesized
ccaauacugacccucuuuacc

SEQ ID NO: 79767 - RNA, 21 nt, Artificial Sequence
  Chemically synthesized
ggauacagcuggacaagaaga

SEQ ID NO: 79768 - RNA, 21 nt, Artificial Sequence
  Chemically synthesized
acugcuauuuccucuaaugaa

SEQ ID NO: 79769 - RNA, 21 nt, Artificial Sequence
  Chemically synthesized
cauuguacaaggaaugaaagu

SEQ ID NO: 79770 - RNA, 21 nt, Artificial Sequence
  Chemically synthesized
agacacgaucgagaaacugaa

SEQ ID NO: 79771 - RNA, 21 nt, Artificial Sequence
  Chemically synthesized
ugaucuuagggaugauaaaga

SEQ ID NO: 79772 - RNA, 21 nt, Artificial Sequence
  Chemically synthesized
cagcuuuugcggagauuuuga

SEQ ID NO: 79773 - RNA, 21 nt, Artificial Sequence
  Chemically synthesized
cgugcaaagugguauccugag

SEQ ID NO: 79774 - RNA, 21 nt, Artificial Sequence
  Chemically synthesized
gauguuccuuugggucuguga

SEQ ID NO: 79775 - RNA, 21 nt, Artificial Sequence
  Chemically synthesized
gaaguggagauuuacacuaca

SEQ ID NO: 79776 - RNA, 21 nt, Artificial Sequence
  Chemically synthesized
caaagaccuucgucuuugaga

SEQ ID NO: 79777 - RNA, 21 nt, Artificial Sequence
  Chemically synthesized
ccuacugucuuugacaauuau

SEQ ID NO: 79778 - RNA, 21 nt, Artificial Sequence
  Chemically synthesized
gugcuuuccauguuacuuuau

SEQ ID NO: 79779 - RNA, 21 nt, Artificial Sequence
  Chemically synthesized
guaaaagugcuuuccauguua

SEQ ID NO: 79780 - RNA, 21 nt, Artificial Sequence
  Chemically synthesized
ucacggguaaaaacucuaaaa

SEQ ID NO: 79781 - RNA, 21 nt, Artificial Sequence
  Chemically synthesized
gucacggguaaaaacucuaaa

SEQ ID NO: 79782 - RNA, 21 nt, Artificial Sequence
  Chemically synthesized
gaucaaaggacaaagacagua

SEQ ID NO: 79783 - RNA, 21 nt, Artificial Sequence
  Chemically synthesized
cgguagcuucugcaguuagga

SEQ ID NO: 79784 - RNA, 21 nt, Artificial Sequence
  Chemically synthesized
ccgagcacugaacuuugcaaa

SEQ ID NO: 79785 - RNA, 21 nt, Artificial Sequence
  Chemically synthesized
aaauguccgugcaaaguggua

SEQ ID NO: 79786 - RNA, 21 nt, Artificial Sequence
  Chemically synthesized
caccgagcacugaacuuugca

SEQ ID NO: 79787 - RNA, 21 nt, Artificial Sequence
  Chemically synthesized
aagacacgaucgagaaacuga

SEQ ID NO: 79788 - RNA, 21 nt, Artificial Sequence
  Chemically synthesized
gaaagugucacggguaaaaac

SEQ ID NO: 79789 - RNA, 21 nt, Artificial Sequence
  Chemically synthesized
aggacaaagacaguauuuuga

SEQ ID NO: 79790 - RNA, 21 nt, Artificial Sequence
  Chemically synthesized
ugaagaagaggaagagaaaau

SEQ ID NO: 79791 - RNA, 21 nt, Artificial Sequence
  Chemically synthesized
gacaguguuugacgaagcgau

SEQ ID NO: 79792 - RNA, 21 nt, Artificial Sequence
  Chemically synthesized
caucauccuagugggaacuaa

SEQ ID NO: 79793 - RNA, 21 nt, Artificial Sequence
  Chemically synthesized
cagugaguuagcagcacgugu

SEQ ID NO: 79794 - RNA, 21 nt, Artificial Sequence
  Chemically synthesized
agcuggacaagaagauuauga

SEQ ID NO: 79795 - RNA, 21 nt, Artificial Sequence
  Chemically synthesized
ugggauacagcuggacaagaa

SEQ ID NO: 79796 - RNA, 21 nt, Artificial Sequence
  Chemically synthesized
gaauuguggaguguuuuuaca

SEQ ID NO: 79797 - RNA, 21 nt, Artificial Sequence
  Chemically synthesized
ugugaucaaaggacaaagaca

SEQ ID NO: 79798 - RNA, 21 nt, Artificial Sequence
  Chemically synthesized
gacgguagcuucugcaguuag

SEQ ID NO: 79799 - RNA, 21 nt, Artificial Sequence
  Chemically synthesized
gugaagaagaggaagagaaaa

SEQ ID NO: 79800 - RNA, 21 nt, Artificial Sequence
  Chemically synthesized
cccuacugucuuugacaauua

SEQ ID NO: 79801 - RNA, 21 nt, Artificial Sequence
  Chemically synthesized
uguaauggagugagcguagca

SEQ ID NO: 79802 - RNA, 21 nt, Artificial Sequence
  Chemically synthesized
cauuguacuguaauggaguga

SEQ ID NO: 79803 - RNA, 21 nt, Artificial Sequence
  Chemically synthesized
auguaguucucagaugcguaa

SEQ ID NO: 79804 - RNA, 21 nt, Artificial Sequence
  Chemically synthesized
aguccugcaucauuugaaaau

SEQ ID NO: 79805 - RNA, 21 nt, Artificial Sequence
  Chemically synthesized
gacccuucagccacuacaaca

SEQ ID NO: 79806 - RNA, 21 nt, Artificial Sequence
  Chemically synthesized
uguuagucgcuaacuuaguaa

SEQ ID NO: 79807 - RNA, 21 nt, Artificial Sequence
  Chemically synthesized
guucuguuagucgcuaacuua

SEQ ID NO: 79808 - RNA, 21 nt, Artificial Sequence
  Chemically synthesized
ccauucuuguucagauuaaga

SEQ ID NO: 79809 - RNA, 21 nt, Artificial Sequence
  Chemically synthesized
cuuugacaauuauucugccaa

SEQ ID NO: 79810 - RNA, 21 nt, Artificial Sequence
  Chemically synthesized
agcuaauaagugcuuuccuua

SEQ ID NO: 79811 - RNA, 21 nt, Artificial Sequence
  Chemically synthesized
ugaaagugucacggguaaaaa

SEQ ID NO: 79812 - RNA, 21 nt, Artificial Sequence
  Chemically synthesized
gacaaaauacgaaguggagau

SEQ ID NO: 79813 - RNA, 21 nt, Artificial Sequence
  Chemically synthesized
caaaggacaaagacaguauuu

SEQ ID NO: 79814 - RNA, 21 nt, Artificial Sequence
  Chemically synthesized
gggauacagcuggacaagaag

SEQ ID NO: 79815 - RNA, 21 nt, Artificial Sequence
  Chemically synthesized
ugcauuuccuggagaauauau

SEQ ID NO: 79816 - RNA, 21 nt, Artificial Sequence
  Chemically synthesized
caaugcauuuccuggagaaua

SEQ ID NO: 79817 - RNA, 21 nt, Artificial Sequence
  Chemically synthesized
uguagucgcuuugccuauuga

SEQ ID NO: 79818 - RNA, 21 nt, Artificial Sequence
  Chemically synthesized
gauuaguaaaagugcuuucca

SEQ ID NO: 79819 - RNA, 21 nt, Artificial Sequence
  Chemically synthesized
ugucacggguaaaaacucuaa

SEQ ID NO: 79820 - RNA, 21 nt, Artificial Sequence
  Chemically synthesized
ugacaaaauacgaaguggaga

SEQ ID NO: 79821 - RNA, 21 nt, Artificial Sequence
  Chemically synthesized
uuugacaaaauacgaagugga

SEQ ID NO: 79822 - RNA, 21 nt, Artificial Sequence
  Chemically synthesized
gacaaagacaguauuuugaca

SEQ ID NO: 79823 - RNA, 21 nt, Artificial Sequence
  Chemically synthesized
cuuugugauuucauagcgagu

SEQ ID NO: 79824 - RNA, 21 nt, Artificial Sequence
  Chemically synthesized
aguucagacucacauucuauu

SEQ ID NO: 79825 - RNA, 21 nt, Artificial Sequence
  Chemically synthesized
gauacagcuggacaagaagau

SEQ ID NO: 79826 - RNA, 21 nt, Artificial Sequence
  Chemically synthesized
ccaauguuaugguagauggaa

SEQ ID NO: 79827 - RNA, 21 nt, Artificial Sequence
  Chemically synthesized
gucaaaugcaguagaugauga

SEQ ID NO: 79828 - RNA, 21 nt, Artificial Sequence
  Chemically synthesized
cggguaaaaacucuaaaaggu

SEQ ID NO: 79829 - RNA, 21 nt, Artificial Sequence
  Chemically synthesized
aauacgaaguggagauuuaca

SEQ ID NO: 79830 - RNA, 21 nt, Artificial Sequence
  Chemically synthesized
cagaacagccucccgaaugaa

SEQ ID NO: 79831 - RNA, 21 nt, Artificial Sequence
  Chemically synthesized
guucagauuaagaguugccaa

SEQ ID NO: 79832 - RNA, 21 nt, Artificial Sequence
  Chemically synthesized
auuugaaaauguccgugcaaa

SEQ ID NO: 79833 - RNA, 21 nt, Artificial Sequence
  Chemically synthesized
uagugcugacgauguucugua

SEQ ID NO: 79834 - RNA, 21 nt, Artificial Sequence
  Chemically synthesized
uucagauuaagaguugccaaa

SEQ ID NO: 79835 - RNA, 21 nt, Artificial Sequence
  Chemically synthesized
gaauauaucccuacugucuuu

SEQ ID NO: 79836 - RNA, 21 nt, Artificial Sequence
  Chemically synthesized
acugaucaguuacacaaccaa

SEQ ID NO: 79837 - RNA, 21 nt, Artificial Sequence
  Chemically synthesized
agugcuuuccauguuacuuua

SEQ ID NO: 79838 - RNA, 21 nt, Artificial Sequence
  Chemically synthesized
aaaagugcuuuccauguuacu

SEQ ID NO: 79839 - RNA, 21 nt, Artificial Sequence
  Chemically synthesized
cuguuagucgcuaacuuagua

SEQ ID NO: 79840 - RNA, 21 nt, Artificial Sequence
  Chemically synthesized
aaugaaagugucacggguaaa

SEQ ID NO: 79841 - RNA, 21 nt, Artificial Sequence
  Chemically synthesized
aggagaagaagcugacuccca

SEQ ID NO: 79842 - RNA, 21 nt, Artificial Sequence
  Chemically synthesized
ggcuuaugggauacagcugga

SEQ ID NO: 79843 - RNA, 21 nt, Artificial Sequence
  Chemically synthesized
guguaaaaaucauguguugca

SEQ ID NO: 79844 - RNA, 21 nt, Artificial Sequence
  Chemically synthesized
ugaucaaaggacaaagacagu

SEQ ID NO: 79845 - RNA, 21 nt, Artificial Sequence
  Chemically synthesized
uauguaguucucagaugcgua

SEQ ID NO: 79846 - RNA, 21 nt, Artificial Sequence
  Chemically synthesized
cacucaaugccaacuuuuugu

SEQ ID NO: 79847 - RNA, 21 nt, Artificial Sequence
  Chemically synthesized
aggccucaagacaguguuuga

SEQ ID NO: 79848 - RNA, 21 nt, Artificial Sequence
  Chemically synthesized
aacugaaggagaagaagcuga

SEQ ID NO: 79849 - RNA, 21 nt, Artificial Sequence
  Chemically synthesized
uagggaugauaaagacacgau

SEQ ID NO: 79850 - RNA, 21 nt, Artificial Sequence
  Chemically synthesized
cccaacacucccaucauccua

SEQ ID NO: 79851 - RNA, 21 nt, Artificial Sequence
  Chemically synthesized
ugugaguccugcaucauuuga

SEQ ID NO: 79852 - RNA, 21 nt, Artificial Sequence
  Chemically synthesized
gccaauguuaugguagaugga

SEQ ID NO: 79853 - RNA, 21 nt, Artificial Sequence
  Chemically synthesized
ucucagaugcguaaagcagaa

SEQ ID NO: 79854 - RNA, 21 nt, Artificial Sequence
  Chemically synthesized
uucucagaugcguaaagcaga

SEQ ID NO: 79855 - RNA, 21 nt, Artificial Sequence
  Chemically synthesized
aguucucagaugcguaaagca

SEQ ID NO: 79856 - RNA, 21 nt, Artificial Sequence
  Chemically synthesized
agacgguagcuucugcaguua

SEQ ID NO: 79857 - RNA, 21 nt, Artificial Sequence
  Chemically synthesized
ugaaucugggcuuaugggaua

SEQ ID NO: 79858 - RNA, 21 nt, Artificial Sequence
  Chemically synthesized
augcauuuccuggagaauaua

SEQ ID NO: 79859 - RNA, 21 nt, Artificial Sequence
  Chemically synthesized
aauacagcgugggacccuuca

SEQ ID NO: 79860 - RNA, 21 nt, Artificial Sequence
  Chemically synthesized
cugugagguucuguaaacugu

SEQ ID NO: 79861 - RNA, 21 nt, Artificial Sequence
  Chemically synthesized
gaagguuuuuuugucgauuag

SEQ ID NO: 79862 - RNA, 21 nt, Artificial Sequence
  Chemically synthesized
gcuaacuuaguaagugcuuuu

SEQ ID NO: 79863 - RNA, 21 nt, Artificial Sequence
  Chemically synthesized
guaaaacuugccuacugauca

SEQ ID NO: 79864 - RNA, 21 nt, Artificial Sequence
  Chemically synthesized
aaugcaguagaugaugaaaga

SEQ ID NO: 79865 - RNA, 21 nt, Artificial Sequence
  Chemically synthesized
ugugugugaucaaaggacaaa

SEQ ID NO: 79866 - RNA, 21 nt, Artificial Sequence
  Chemically synthesized
gagaagacgguagcuucugca

SEQ ID NO: 79867 - RNA, 21 nt, Artificial Sequence
  Chemically synthesized
cuccuguagucgcuuugccua

SEQ ID NO: 79868 - RNA, 21 nt, Artificial Sequence
  Chemically synthesized
gggugugugugaucaaaggac

SEQ ID NO: 79869 - RNA, 21 nt, Artificial Sequence
  Chemically synthesized
cgagcacugaacuuugcaaag

SEQ ID NO: 79870 - RNA, 21 nt, Artificial Sequence
  Chemically synthesized
cauccuagugggaacuaaacu

SEQ ID NO: 79871 - RNA, 21 nt, Artificial Sequence
  Chemically synthesized
accaaugcauuuccuggagaa

SEQ ID NO: 79872 - RNA, 21 nt, Artificial Sequence
  Chemically synthesized
caguagaugaugaaagaaagg

SEQ ID NO: 79873 - RNA, 21 nt, Artificial Sequence
  Chemically synthesized
gugugaucaaaggacaaagac

SEQ ID NO: 79874 - RNA, 21 nt, Artificial Sequence
  Chemically synthesized
accgagcacugaacuuugcaa

SEQ ID NO: 79875 - RNA, 21 nt, Artificial Sequence
  Chemically synthesized
caaugccaacuuuuuguuaca

SEQ ID NO: 79876 - RNA, 21 nt, Artificial Sequence
  Chemically synthesized
augauaaagacacgaucgaga

SEQ ID NO: 79877 - RNA, 21 nt, Artificial Sequence
  Chemically synthesized
aaccaaugcauuuccuggaga

SEQ ID NO: 79878 - RNA, 21 nt, Artificial Sequence
  Chemically synthesized
aacugugcuagugcugacgau

SEQ ID NO: 79879 - RNA, 21 nt, Artificial Sequence
  Chemically synthesized
caguuacacaaccaaugcauu

SEQ ID NO: 79880 - RNA, 21 nt, Artificial Sequence
  Chemically synthesized
cuuuggaucagucuuugugau

SEQ ID NO: 79881 - RNA, 21 nt, Artificial Sequence
  Chemically synthesized
gaagcguugccauugaacuca

SEQ ID NO: 79882 - RNA, 21 nt, Artificial Sequence
  Chemically synthesized
ucagaugcguaaagcagaaca

SEQ ID NO: 79883 - RNA, 21 nt, Artificial Sequence
  Chemically synthesized
cgaggccucaagacaguguuu

SEQ ID NO: 79884 - RNA, 21 nt, Artificial Sequence
  Chemically synthesized
cuggacaagaagauuaugaca

SEQ ID NO: 79885 - RNA, 21 nt, Artificial Sequence
  Chemically synthesized
uuaugggauacagcuggacaa

SEQ ID NO: 79886 - RNA, 21 nt, Artificial Sequence
  Chemically synthesized
uugggucugugagguucugua

SEQ ID NO: 79887 - RNA, 21 nt, Artificial Sequence
  Chemically synthesized
aaucauguguugcagcuuuau

SEQ ID NO: 79888 - RNA, 21 nt, Artificial Sequence
  Chemically synthesized
gcuguagguaaaacuugccua

SEQ ID NO: 79889 - RNA, 21 nt, Artificial Sequence
  Chemically synthesized
aguggagauuuacacuacauu

SEQ ID NO: 79890 - RNA, 21 nt, Artificial Sequence
  Chemically synthesized
aaagcagaacagccucccgaa

SEQ ID NO: 79891 - RNA, 21 nt, Artificial Sequence
  Chemically synthesized
acagcuggacaagaagauuau

SEQ ID NO: 79892 - RNA, 21 nt, Artificial Sequence
  Chemically synthesized
guuucucugcaguuuuccuca

SEQ ID NO: 79893 - RNA, 21 nt, Artificial Sequence
  Chemically synthesized
agaauauaucccuacugucuu

SEQ ID NO: 79894 - RNA, 21 nt, Artificial Sequence
  Chemically synthesized
auuucauagcgaguuuucuga

SEQ ID NO: 79895 - RNA, 21 nt, Artificial Sequence
  Chemically synthesized
uuuggaucagucuuugugauu

SEQ ID NO: 79896 - RNA, 21 nt, Artificial Sequence
  Chemically synthesized
aaugaagcguugccauugaac

SEQ ID NO: 79897 - RNA, 21 nt, Artificial Sequence
  Chemically synthesized
auguaagaguucagacucaca

SEQ ID NO: 79898 - RNA, 21 nt, Artificial Sequence
  Chemically synthesized
agccuucgcacucaaugccaa

SEQ ID NO: 79899 - RNA, 21 nt, Artificial Sequence
  Chemically synthesized
ucuugguccugucccuuggaa

SEQ ID NO: 79900 - RNA, 21 nt, Artificial Sequence
  Chemically synthesized
cucaagacaguguuugacgaa

SEQ ID NO: 79901 - RNA, 21 nt, Artificial Sequence
  Chemically synthesized
cuguaaaauaccuggagugcu

SEQ ID NO: 79902 - RNA, 21 nt, Artificial Sequence
  Chemically synthesized
gagcggccauuuccuguuucu

SEQ ID NO: 79903 - RNA, 21 nt, Artificial Sequence
  Chemically synthesized
agauggaaaaccggugaaucu

SEQ ID NO: 79904 - RNA, 21 nt, Artificial Sequence
  Chemically synthesized
guguugcagcuuuauaguuuu

SEQ ID NO: 79905 - RNA, 21 nt, Artificial Sequence
  Chemically synthesized
agaugaugaaagaaagguugg

SEQ ID NO: 79906 - RNA, 21 nt, Artificial Sequence
  Chemically synthesized
aacugcuauuuccucuaauga

SEQ ID NO: 79907 - RNA, 21 nt, Artificial Sequence
  Chemically synthesized
cucccgugaagaagaggaaga

SEQ ID NO: 79908 - RNA, 21 nt, Artificial Sequence
  Chemically synthesized
agaagaagcugacucccauca

SEQ ID NO: 79909 - RNA, 21 nt, Artificial Sequence
  Chemically synthesized
gcuggacaagaagauuaugac

SEQ ID NO: 79910 - RNA, 21 nt, Artificial Sequence
  Chemically synthesized
augggauacagcuggacaaga

SEQ ID NO: 79911 - RNA, 21 nt, Artificial Sequence
  Chemically synthesized
gugaaucugggcuuaugggau

SEQ ID NO: 79912 - RNA, 21 nt, Artificial Sequence
  Chemically synthesized
uaugguagauggaaaaccggu

SEQ ID NO: 79913 - RNA, 21 nt, Artificial Sequence
  Chemically synthesized
aaugcauuuccuggagaauau

SEQ ID NO: 79914 - RNA, 21 nt, Artificial Sequence
  Chemically synthesized
aauugacaguugcagaauugu

SEQ ID NO: 79915 - RNA, 21 nt, Artificial Sequence
  Chemically synthesized
uggagauuuacacuacauugu

SEQ ID NO: 79916 - RNA, 21 nt, Artificial Sequence
  Chemically synthesized
caaaauacgaaguggagauuu

SEQ ID NO: 79917 - RNA, 21 nt, Artificial Sequence
  Chemically synthesized
ggacaaagacaguauuuugac

SEQ ID NO: 79918 - RNA, 21 nt, Artificial Sequence
  Chemically synthesized
ugugugaucaaaggacaaaga

SEQ ID NO: 79919 - RNA, 21 nt, Artificial Sequence
  Chemically synthesized
cuuuugcggagauuuugaaca

SEQ ID NO: 79920 - RNA, 21 nt, Artificial Sequence
  Chemically synthesized
ugcuguaaaauaccuggagug

SEQ ID NO: 79921 - RNA, 21 nt, Artificial Sequence
  Chemically synthesized
aaaauguccgugcaaaguggu

SEQ ID NO: 79922 - RNA, 21 nt, Artificial Sequence
  Chemically synthesized
gacaguugcagaauuguggag

SEQ ID NO: 79923 - RNA, 21 nt, Artificial Sequence
  Chemically synthesized
cuuuaaacugguuguucuguu

SEQ ID NO: 79924 - RNA, 21 nt, Artificial Sequence
  Chemically synthesized
aagaaagguugguauuaucag

SEQ ID NO: 79925 - RNA, 21 nt, Artificial Sequence
  Chemically synthesized
aguagaugaugaaagaaaggu

SEQ ID NO: 79926 - RNA, 21 nt, Artificial Sequence
  Chemically synthesized
gagauuuacacuacauuguac

SEQ ID NO: 79927 - RNA, 21 nt, Artificial Sequence
  Chemically synthesized
aaguggagauuuacacuacau

SEQ ID NO: 79928 - RNA, 21 nt, Artificial Sequence
  Chemically synthesized
guacuguaauggagugagcgu

SEQ ID NO: 79929 - RNA, 21 nt, Artificial Sequence
  Chemically synthesized
gguagcuucugcaguuaggag

SEQ ID NO: 79930 - RNA, 21 nt, Artificial Sequence
  Chemically synthesized
gccaacuuuuuguuacagauu

SEQ ID NO: 79931 - RNA, 21 nt, Artificial Sequence
  Chemically synthesized
ucgagaaacugaaggagaaga

SEQ ID NO: 79932 - RNA, 21 nt, Artificial Sequence
  Chemically synthesized
cacgaucgagaaacugaagga

SEQ ID NO: 79933 - RNA, 21 nt, Artificial Sequence
  Chemically synthesized
aacuaaacuugaucuuaggga

SEQ ID NO: 79934 - RNA, 21 nt, Artificial Sequence
  Chemically synthesized
gacaagaagauuaugacagau

SEQ ID NO: 79935 - RNA, 21 nt, Artificial Sequence
  Chemically synthesized
ggagaauauaucccuacuguc

SEQ ID NO: 79936 - RNA, 21 nt, Artificial Sequence
  Chemically synthesized
acuuaacucacuggcgagaau

SEQ ID NO: 79937 - RNA, 21 nt, Artificial Sequence
  Chemically synthesized
auguguugcagcuuuauaguu

SEQ ID NO: 79938 - RNA, 21 nt, Artificial Sequence
  Chemically synthesized
ccauguuacuuuauucagagc

SEQ ID NO: 79939 - RNA, 21 nt, Artificial Sequence
  Chemically synthesized
agaacagccucccgaaugaag

SEQ ID NO: 79940 - RNA, 21 nt, Artificial Sequence
  Chemically synthesized
cuugcucuccuauguaguucu

SEQ ID NO: 79941 - RNA, 21 nt, Artificial Sequence
  Chemically synthesized
aaaugacaagccuucuuaaag

SEQ ID NO: 79942 - RNA, 21 nt, Artificial Sequence
  Chemically synthesized
aaauguaagaguucagacuca

SEQ ID NO: 79943 - RNA, 21 nt, Artificial Sequence
  Chemically synthesized
cccgugaagaagaggaagaga

SEQ ID NO: 79944 - RNA, 21 nt, Artificial Sequence
  Chemically synthesized
auauaucccuacugucuuuga

SEQ ID NO: 79945 - RNA, 21 nt, Artificial Sequence
  Chemically synthesized
ccuggagaauauaucccuacu

SEQ ID NO: 79946 - RNA, 21 nt, Artificial Sequence
  Chemically synthesized
cauguguugcagcuuuauagu

SEQ ID NO: 79947 - RNA, 21 nt, Artificial Sequence
  Chemically synthesized
aucauguguugcagcuuuaua

SEQ ID NO: 79948 - RNA, 21 nt, Artificial Sequence
  Chemically synthesized
augccaacuuuuuguuacaga

SEQ ID NO: 79949 - RNA, 21 nt, Artificial Sequence
  Chemically synthesized
cugucccuuggaaccuuugua

SEQ ID NO: 79950 - RNA, 21 nt, Artificial Sequence
  Chemically synthesized
uggugcuguaaaauaccugga

SEQ ID NO: 79951 - RNA, 21 nt, Artificial Sequence
  Chemically synthesized
gucuagccauggcuaaggaga

SEQ ID NO: 79952 - RNA, 21 nt, Artificial Sequence
  Chemically synthesized
gaaacugaaggagaagaagcu

SEQ ID NO: 79953 - RNA, 21 nt, Artificial Sequence
  Chemically synthesized
gacacgaucgagaaacugaag

SEQ ID NO: 79954 - RNA, 21 nt, Artificial Sequence
  Chemically synthesized
aaacugugcuagugcugacga

SEQ ID NO: 79955 - RNA, 21 nt, Artificial Sequence
  Chemically synthesized
ugguuguucuguuagucgcua

SEQ ID NO: 79956 - RNA, 21 nt, Artificial Sequence
  Chemically synthesized
cugguuguucuguuagucgcu

SEQ ID NO: 79957 - RNA, 21 nt, Artificial Sequence
  Chemically synthesized
gaugaugaaagaaagguuggu

SEQ ID NO: 79958 - RNA, 21 nt, Artificial Sequence
  Chemically synthesized
acuacauuguacaaggaauga

SEQ ID NO: 79959 - RNA, 21 nt, Artificial Sequence
  Chemically synthesized
cuauguaguucucagaugcgu

SEQ ID NO: 79960 - RNA, 21 nt, Artificial Sequence
  Chemically synthesized
caguuaggaggugcagacacu

SEQ ID NO: 79961 - RNA, 21 nt, Artificial Sequence
  Chemically synthesized
gagcacugaacuuugcaaaga

SEQ ID NO: 79962 - RNA, 21 nt, Artificial Sequence
  Chemically synthesized
ugccaacuuuuuguuacagau

SEQ ID NO: 79963 - RNA, 21 nt, Artificial Sequence
  Chemically synthesized
auuggugcuguaaaauaccug

SEQ ID NO: 79964 - RNA, 21 nt, Artificial Sequence
  Chemically synthesized
uuagggaugauaaagacacga

SEQ ID NO: 79965 - RNA, 21 nt, Artificial Sequence
  Chemically synthesized
uaaacuugaucuuagggauga

SEQ ID NO: 79966 - RNA, 21 nt, Artificial Sequence
  Chemically synthesized
cugucccaacacucccaucau

SEQ ID NO: 79967 - RNA, 21 nt, Artificial Sequence
  Chemically synthesized
aaucugggcuuaugggauaca

SEQ ID NO: 79968 - RNA, 21 nt, Artificial Sequence
  Chemically synthesized
cugugcuagugcugacgaugu

SEQ ID NO: 79969 - RNA, 21 nt, Artificial Sequence
  Chemically synthesized
aguuacacaaccaaugcauuu

SEQ ID NO: 79970 - RNA, 21 nt, Artificial Sequence
  Chemically synthesized
uacugaucaguuacacaacca

SEQ ID NO: 79971 - RNA, 21 nt, Artificial Sequence
  Chemically synthesized
cuugccuacugaucaguuaca

SEQ ID NO: 79972 - RNA, 21 nt, Artificial Sequence
  Chemically synthesized
acgaaguggagauuuacacua

SEQ ID NO: 79973 - RNA, 21 nt, Artificial Sequence
  Chemically synthesized
aacauuguacuguaauggagu

SEQ ID NO: 79974 - RNA, 21 nt, Artificial Sequence
  Chemically synthesized
agugaguuagcagcacguguu

SEQ ID NO: 79975 - RNA, 21 nt, Artificial Sequence
  Chemically synthesized
gccauuuccuguuucucugca

SEQ ID NO: 79976 - RNA, 21 nt, Artificial Sequence
  Chemically synthesized
cucccaucauccuagugggaa

SEQ ID NO: 79977 - RNA, 21 nt, Artificial Sequence
  Chemically synthesized
gcaucauuugaaaauguccgu

SEQ ID NO: 79978 - RNA, 21 nt, Artificial Sequence
  Chemically synthesized
cuuuugcuaaugcaauuagca

SEQ ID NO: 79979 - RNA, 21 nt, Artificial Sequence
  Chemically synthesized
ucauguguugcagcuuuauag

SEQ ID NO: 79980 - RNA, 21 nt, Artificial Sequence
  Chemically synthesized
cacggguaaaaacucuaaaag

SEQ ID NO: 79981 - RNA, 21 nt, Artificial Sequence
  Chemically synthesized
aaagugucacggguaaaaacu

SEQ ID NO: 79982 - RNA, 21 nt, Artificial Sequence
  Chemically synthesized
augaaagugucacggguaaaa

SEQ ID NO: 79983 - RNA, 21 nt, Artificial Sequence
  Chemically synthesized
gugugugaucaaaggacaaag

SEQ ID NO: 79984 - RNA, 21 nt, Artificial Sequence
  Chemically synthesized
gauuggugcuguaaaauaccu

SEQ ID NO: 79985 - RNA, 21 nt, Artificial Sequence
  Chemically synthesized
aucuuagggaugauaaagaca

SEQ ID NO: 79986 - RNA, 21 nt, Artificial Sequence
  Chemically synthesized
uacagcuggacaagaagauua

SEQ ID NO: 79987 - RNA, 21 nt, Artificial Sequence
  Chemically synthesized
caacuuaacucacuggcgaga

SEQ ID NO: 79988 - RNA, 21 nt, Artificial Sequence
  Chemically synthesized
agucgcuuugccuauugaugu

SEQ ID NO: 79989 - RNA, 21 nt, Artificial Sequence
  Chemically synthesized
cauguuacuuuauucagagcu

SEQ ID NO: 79990 - RNA, 21 nt, Artificial Sequence
  Chemically synthesized
auuucugucaaaugcaguaga

SEQ ID NO: 79991 - RNA, 21 nt, Artificial Sequence
  Chemically synthesized
cauucuuguucagauuaagag

SEQ ID NO: 79992 - RNA, 21 nt, Artificial Sequence
  Chemically synthesized
gugcuguaaaauaccuggagu

SEQ ID NO: 79993 - RNA, 21 nt, Artificial Sequence
  Chemically synthesized
gagauuggugcuguaaaauac

SEQ ID NO: 79994 - RNA, 21 nt, Artificial Sequence
  Chemically synthesized
gcggccauuuccuguuucucu

SEQ ID NO: 79995 - RNA, 21 nt, Artificial Sequence
  Chemically synthesized
uuugaaaauguccgugcaaag

SEQ ID NO: 79996 - RNA, 21 nt, Artificial Sequence
  Chemically synthesized
cuugugaguccugcaucauuu

SEQ ID NO: 79997 - RNA, 21 nt, Artificial Sequence
  Chemically synthesized
ugugcuagugcugacgauguu

SEQ ID NO: 79998 - RNA, 21 nt, Artificial Sequence
  Chemically synthesized
cuugaccaauacugacccucu

SEQ ID NO: 79999 - RNA, 21 nt, Artificial Sequence
  Chemically synthesized
uaguaaaagugcuuuccaugu

SEQ ID NO: 80000 - RNA, 21 nt, Artificial Sequence
  Chemically synthesized
ucuguuagucgcuaacuuagu

SEQ ID NO: 80001 - RNA, 21 nt, Artificial Sequence
  Chemically synthesized
aaaugcaguagaugaugaaag

SEQ ID NO: 80002 - RNA, 21 nt, Artificial Sequence
  Chemically synthesized
gaagaauucuguuuagcugug

SEQ ID NO: 80003 - RNA, 21 nt, Artificial Sequence
  Chemically synthesized
uacuguaauggagugagcgua

SEQ ID NO: 80004 - RNA, 21 nt, Artificial Sequence
  Chemically synthesized
ugccauugaacucaccaguga

SEQ ID NO: 80005 - RNA, 21 nt, Artificial Sequence
  Chemically synthesized
guaguucucagaugcguaaag

SEQ ID NO: 80006 - RNA, 21 nt, Artificial Sequence
  Chemically synthesized
cagacacuugcucuccuaugu

SEQ ID NO: 80007 - RNA, 21 nt, Artificial Sequence
  Chemically synthesized
agaccuucgucuuugagaaga

SEQ ID NO: 80008 - RNA, 21 nt, Artificial Sequence
  Chemically synthesized
cuaaauguaagaguucagacu

SEQ ID NO: 80009 - RNA, 21 nt, Artificial Sequence
  Chemically synthesized
uucuugguccugucccuugga

SEQ ID NO: 80010 - RNA, 21 nt, Artificial Sequence
  Chemically synthesized
aaaaugccugcuguuguaaau

SEQ ID NO: 80011 - RNA, 21 nt, Artificial Sequence
  Chemically synthesized
ccaacacucccaucauccuag

SEQ ID NO: 80012 - RNA, 21 nt, Artificial Sequence
  Chemically synthesized
ugaaaauguccgugcaaagug

SEQ ID NO: 80013 - RNA, 21 nt, Artificial Sequence
  Chemically synthesized
uggacaagaagauuaugacag

SEQ ID NO: 80014 - RNA, 21 nt, Artificial Sequence
  Chemically synthesized
aagugcuuuccauguuacuuu

SEQ ID NO: 80015 - RNA, 21 nt, Artificial Sequence
  Chemically synthesized
aguaaaagugcuuuccauguu

SEQ ID NO: 80016 - RNA, 21 nt, Artificial Sequence
  Chemically synthesized
uagguaaaacuugccuacuga

SEQ ID NO: 80017 - RNA, 21 nt, Artificial Sequence
  Chemically synthesized
ucaaaggacaaagacaguauu

SEQ ID NO: 80018 - RNA, 21 nt, Artificial Sequence
  Chemically synthesized
aucaaaggacaaagacaguau

SEQ ID NO: 80019 - RNA, 21 nt, Artificial Sequence
  Chemically synthesized
cagucuuugugauuucauagc

SEQ ID NO: 80020 - RNA, 21 nt, Artificial Sequence
  Chemically synthesized
cuucgucuuugagaagacggu

SEQ ID NO: 80021 - RNA, 21 nt, Artificial Sequence
  Chemically synthesized
acugaacuuugcaaagaccuu

SEQ ID NO: 80022 - RNA, 21 nt, Artificial Sequence
  Chemically synthesized
agaacaccgagcacugaacuu

SEQ ID NO: 80023 - RNA, 21 nt, Artificial Sequence
  Chemically synthesized
uuguugugccgagaacaccga

SEQ ID NO: 80024 - RNA, 21 nt, Artificial Sequence
  Chemically synthesized
uaagaguugccaaaauaccuu

SEQ ID NO: 80025 - RNA, 21 nt, Artificial Sequence
  Chemically synthesized
ccucaagacaguguuugacga

SEQ ID NO: 80026 - RNA, 21 nt, Artificial Sequence
  Chemically synthesized
acacgaucgagaaacugaagg

SEQ ID NO: 80027 - RNA, 21 nt, Artificial Sequence
  Chemically synthesized
ugcaaagugguauccugaggu

SEQ ID NO: 80028 - RNA, 21 nt, Artificial Sequence
  Chemically synthesized
uugugaguccugcaucauuug

SEQ ID NO: 80029 - RNA, 21 nt, Artificial Sequence
  Chemically synthesized
caguuuuccucagcuuugggu

SEQ ID NO: 80030 - RNA, 21 nt, Artificial Sequence
  Chemically synthesized
gaaucugggcuuaugggauac

SEQ ID NO: 80031 - RNA, 21 nt, Artificial Sequence
  Chemically synthesized
aaccggugaaucugggcuuau

SEQ ID NO: 80032 - RNA, 21 nt, Artificial Sequence
  Chemically synthesized
uauucugccaauguuauggua

SEQ ID NO: 80033 - RNA, 21 nt, Artificial Sequence
  Chemically synthesized
uguaaacugugcuagugcuga

SEQ ID NO: 80034 - RNA, 21 nt, Artificial Sequence
  Chemically synthesized
ugugagguucuguaaacugug

SEQ ID NO: 80035 - RNA, 21 nt, Artificial Sequence
  Chemically synthesized
agcacguguucccgacauaac

SEQ ID NO: 80036 - RNA, 21 nt, Artificial Sequence
  Chemically synthesized
uuaagaguugccaaaauaccu

SEQ ID NO: 80037 - RNA, 21 nt, Artificial Sequence
  Chemically synthesized
acucaaugccaacuuuuuguu

SEQ ID NO: 80038 - RNA, 21 nt, Artificial Sequence
  Chemically synthesized
ccugucccuuggaaccuuugu

SEQ ID NO: 80039 - RNA, 21 nt, Artificial Sequence
  Chemically synthesized
cucugcaguuuuccucagcuu

SEQ ID NO: 80040 - RNA, 21 nt, Artificial Sequence
  Chemically synthesized
gcauuuccuggagaauauauc

SEQ ID NO: 80041 - RNA, 21 nt, Artificial Sequence
  Chemically synthesized
ccaaugcauuuccuggagaau

SEQ ID NO: 80042 - RNA, 21 nt, Artificial Sequence
  Chemically synthesized
cugaucaguuacacaaccaau

SEQ ID NO: 80043 - RNA, 21 nt, Artificial Sequence
  Chemically synthesized
uguguugcagcuuuauaguuu

SEQ ID NO: 80044 - RNA, 21 nt, Artificial Sequence
  Chemically synthesized
aguuuucuaguaacuaggugu

SEQ ID NO: 80045 - RNA, 21 nt, Artificial Sequence
  Chemically synthesized
gagcuaauaagugcuuuccuu

SEQ ID NO: 80046 - RNA, 21 nt, Artificial Sequence
  Chemically synthesized
agagcuaauaagugcuuuccu

SEQ ID NO: 80047 - RNA, 21 nt, Artificial Sequence
  Chemically synthesized
gcuuuuccuuucucuuacacc

SEQ ID NO: 80048 - RNA, 21 nt, Artificial Sequence
  Chemically synthesized
acggguaaaaacucuaaaagg

SEQ ID NO: 80049 - RNA, 21 nt, Artificial Sequence
  Chemically synthesized
aagugucacggguaaaaacuc

SEQ ID NO: 80050 - RNA, 21 nt, Artificial Sequence
  Chemically synthesized
ucuuugugauuucauagcgag

SEQ ID NO: 80051 - RNA, 21 nt, Artificial Sequence
  Chemically synthesized
acuguaauggagugagcguag

SEQ ID NO: 80052 - RNA, 21 nt, Artificial Sequence
  Chemically synthesized
ccuauguaguucucagaugcg

SEQ ID NO: 80053 - RNA, 21 nt, Artificial Sequence
  Chemically synthesized
cucaaugccaacuuuuuguua

SEQ ID NO: 80054 - RNA, 21 nt, Artificial Sequence
  Chemically synthesized
agaggaagagaaaaugccugc

SEQ ID NO: 80055 - RNA, 21 nt, Artificial Sequence
  Chemically synthesized
gaugauaaagacacgaucgag

SEQ ID NO: 80056 - RNA, 21 nt, Artificial Sequence
  Chemically synthesized
ugucuugccagauuaccgaca

SEQ ID NO: 80057 - RNA, 21 nt, Artificial Sequence
  Chemically synthesized
cuuaguuuucuaguaacuagg

SEQ ID NO: 80058 - RNA, 21 nt, Artificial Sequence
  Chemically synthesized
cuaauaagugcuuuccuuagu

SEQ ID NO: 80059 - RNA, 21 nt, Artificial Sequence
  Chemically synthesized
gcauuagaagguuuuuuuguc

SEQ ID NO: 80060 - RNA, 21 nt, Artificial Sequence
  Chemically synthesized
cgaaguggagauuuacacuac

SEQ ID NO: 80061 - RNA, 21 nt, Artificial Sequence
  Chemically synthesized
ucugcaguuaggaggugcaga

SEQ ID NO: 80062 - RNA, 21 nt, Artificial Sequence
  Chemically synthesized
cuucugcaguuaggaggugca

SEQ ID NO: 80063 - RNA, 21 nt, Artificial Sequence
  Chemically synthesized
aaauaccuucugaacuacacu

SEQ ID NO: 80064 - RNA, 21 nt, Artificial Sequence
  Chemically synthesized
aagaguucagacucacauucu

SEQ ID NO: 80065 - RNA, 21 nt, Artificial Sequence
  Chemically synthesized
agugggaacuaaacuugaucu

SEQ ID NO: 80066 - RNA, 21 nt, Artificial Sequence
  Chemically synthesized
gaaaauguccgugcaaagugg

SEQ ID NO: 80067 - RNA, 21 nt, Artificial Sequence
  Chemically synthesized
cuuaugggauacagcuggaca

SEQ ID NO: 80068 - RNA, 21 nt, Artificial Sequence
  Chemically synthesized
gauggaaaaccggugaaucug

SEQ ID NO: 80069 - RNA, 21 nt, Artificial Sequence
  Chemically synthesized
aucccuacugucuuugacaau

SEQ ID NO: 80070 - RNA, 21 nt, Artificial Sequence
  Chemically synthesized
uccuggagaauauaucccuac

SEQ ID NO: 80071 - RNA, 21 nt, Artificial Sequence
  Chemically synthesized
aacucacuggcgagaauacag

SEQ ID NO: 80072 - RNA, 21 nt, Artificial Sequence
  Chemically synthesized
gccuauugauguuccuuuggg

SEQ ID NO: 80073 - RNA, 21 nt, Artificial Sequence
  Chemically synthesized
uuaacaucacugucuugccag

SEQ ID NO: 80074 - RNA, 21 nt, Artificial Sequence
  Chemically synthesized
ucgcuaacuuaguaagugcuu

SEQ ID NO: 80075 - RNA, 21 nt, Artificial Sequence
  Chemically synthesized
uucuguuagucgcuaacuuag

SEQ ID NO: 80076 - RNA, 21 nt, Artificial Sequence
  Chemically synthesized
uguucuguuagucgcuaacuu

SEQ ID NO: 80077 - RNA, 21 nt, Artificial Sequence
  Chemically synthesized
cuuucucuuacaccugccaug

SEQ ID NO: 80078 - RNA, 21 nt, Artificial Sequence
  Chemically synthesized
uuugcggagauuuugaacaga

SEQ ID NO: 80079 - RNA, 21 nt, Artificial Sequence
  Chemically synthesized
auugaacucaccagugaguua

SEQ ID NO: 80080 - RNA, 21 nt, Artificial Sequence
  Chemically synthesized
gacacuugcucuccuauguag

SEQ ID NO: 80081 - RNA, 21 nt, Artificial Sequence
  Chemically synthesized
ccuucgucuuugagaagacgg

SEQ ID NO: 80082 - RNA, 21 nt, Artificial Sequence
  Chemically synthesized
cugcauuguugugccgagaac

SEQ ID NO: 80083 - RNA, 21 nt, Artificial Sequence
  Chemically synthesized
uguaagaguucagacucacau

SEQ ID NO: 80084 - RNA, 21 nt, Artificial Sequence
  Chemically synthesized
uaaagacacgaucgagaaacu

SEQ ID NO: 80085 - RNA, 21 nt, Artificial Sequence
  Chemically synthesized
cugggcuuaugggauacagcu

SEQ ID NO: 80086 - RNA, 21 nt, Artificial Sequence
  Chemically synthesized
uucuguacaacuuaacucacu

SEQ ID NO: 80087 - RNA, 21 nt, Artificial Sequence
  Chemically synthesized
acuugaccaauacugacccuc

SEQ ID NO: 80088 - RNA, 21 nt, Artificial Sequence
  Chemically synthesized
aggaaugaaagugucacgggu

SEQ ID NO: 80089 - RNA, 21 nt, Artificial Sequence
  Chemically synthesized
gugaucaaaggacaaagacag

SEQ ID NO: 80090 - RNA, 21 nt, Artificial Sequence
  Chemically synthesized
gauuucauagcgaguuuucug

SEQ ID NO: 80091 - RNA, 21 nt, Artificial Sequence
  Chemically synthesized
ucuuuggaucagucuuuguga

SEQ ID NO: 80092 - RNA, 21 nt, Artificial Sequence
  Chemically synthesized
guucccgacauaacauuguac

SEQ ID NO: 80093 - RNA, 21 nt, Artificial Sequence
  Chemically synthesized
aagcguugccauugaacucac

SEQ ID NO: 80094 - RNA, 21 nt, Artificial Sequence
  Chemically synthesized
aagcagaacagccucccgaau

SEQ ID NO: 80095 - RNA, 21 nt, Artificial Sequence
  Chemically synthesized
gaacaccgagcacugaacuuu

SEQ ID NO: 80096 - RNA, 21 nt, Artificial Sequence
  Chemically synthesized
uaccuucugaacuacacugca

SEQ ID NO: 80097 - RNA, 21 nt, Artificial Sequence
  Chemically synthesized
aaugccugcuguuguaaaugu

SEQ ID NO: 80098 - RNA, 21 nt, Artificial Sequence
  Chemically synthesized
ucccaacacucccaucauccu

SEQ ID NO: 80099 - RNA, 21 nt, Artificial Sequence
  Chemically synthesized
guccgugcaaagugguauccu

SEQ ID NO: 80100 - RNA, 21 nt, Artificial Sequence
  Chemically synthesized
uguucuguacaacuuaacuca

SEQ ID NO: 80101 - RNA, 21 nt, Artificial Sequence
  Chemically synthesized
gauguucuguacaacuuaacu

SEQ ID NO: 80102 - RNA, 21 nt, Artificial Sequence
  Chemically synthesized
uauugauguuccuuugggucu

SEQ ID NO: 80103 - RNA, 21 nt, Artificial Sequence
  Chemically synthesized
uugaccaauacugacccucuu

SEQ ID NO: 80104 - RNA, 21 nt, Artificial Sequence
  Chemically synthesized
uaacaucacugucuugccaga

SEQ ID NO: 80105 - RNA, 21 nt, Artificial Sequence
  Chemically synthesized
agugucacggguaaaaacucu

SEQ ID NO: 80106 - RNA, 21 nt, Artificial Sequence
  Chemically synthesized
cguugccauugaacucaccag

SEQ ID NO: 80107 - RNA, 21 nt, Artificial Sequence
  Chemically synthesized
gcucuccuauguaguucucag

SEQ ID NO: 80108 - RNA, 21 nt, Artificial Sequence
  Chemically synthesized
guucuaaauguaagaguucag

SEQ ID NO: 80109 - RNA, 21 nt, Artificial Sequence
  Chemically synthesized
gaggaagagaaaaugccugcu

SEQ ID NO: 80110 - RNA, 21 nt, Artificial Sequence
  Chemically synthesized
ucuuagggaugauaaagacac

SEQ ID NO: 80111 - RNA, 21 nt, Artificial Sequence
  Chemically synthesized
uaacucacuggcgagaauaca

SEQ ID NO: 80112 - RNA, 21 nt, Artificial Sequence
  Chemically synthesized
auacugacccucuuuaccucg

SEQ ID NO: 80113 - RNA, 21 nt, Artificial Sequence
  Chemically synthesized
gagcuguagguaaaacuugcc

SEQ ID NO: 80114 - RNA, 21 nt, Artificial Sequence
  Chemically synthesized
aaauacgaaguggagauuuac

SEQ ID NO: 80115 - RNA, 21 nt, Artificial Sequence
  Chemically synthesized
cauagcgaguuuucugaccag

SEQ ID NO: 80116 - RNA, 21 nt, Artificial Sequence
  Chemically synthesized
ggccauuuccuguuucucugc

SEQ ID NO: 80117 - RNA, 21 nt, Artificial Sequence
  Chemically synthesized
ccuuauuuuucaaaagcgccc

SEQ ID NO: 80118 - RNA, 21 nt, Artificial Sequence
  Chemically synthesized
uguaaaauaccuggagugcuc

SEQ ID NO: 80119 - RNA, 21 nt, Artificial Sequence
  Chemically synthesized
caacacucccaucauccuagu

SEQ ID NO: 80120 - RNA, 21 nt, Artificial Sequence
  Chemically synthesized
gcaaagugguauccugaggug

SEQ ID NO: 80121 - RNA, 21 nt, Artificial Sequence
  Chemically synthesized
uuuucccuugugaguccugca

SEQ ID NO: 80122 - RNA, 21 nt, Artificial Sequence
  Chemically synthesized
uaucccuacugucuuugacaa

SEQ ID NO: 80123 - RNA, 21 nt, Artificial Sequence
  Chemically synthesized
auaucccuacugucuuugaca

SEQ ID NO: 80124 - RNA, 21 nt, Artificial Sequence
  Chemically synthesized
ucaguuacacaaccaaugcau

SEQ ID NO: 80125 - RNA, 21 nt, Artificial Sequence
  Chemically synthesized
uacugacccucuuuaccucgc

SEQ ID NO: 80126 - RNA, 21 nt, Artificial Sequence
  Chemically synthesized
aauacugacccucuuuaccuc

SEQ ID NO: 80127 - RNA, 21 nt, Artificial Sequence
  Chemically synthesized
uaaaagugcuuuccauguuac

SEQ ID NO: 80128 - RNA, 21 nt, Artificial Sequence
  Chemically synthesized
ucugauaaugcauuagaaggu

SEQ ID NO: 80129 - RNA, 21 nt, Artificial Sequence
  Chemically synthesized
uagcgaguuuucugaccagcu

SEQ ID NO: 80130 - RNA, 21 nt, Artificial Sequence
  Chemically synthesized
uaacauuguacuguaauggag

SEQ ID NO: 80131 - RNA, 21 nt, Artificial Sequence
  Chemically synthesized
acgguagcuucugcaguuagg

SEQ ID NO: 80132 - RNA, 21 nt, Artificial Sequence
  Chemically synthesized
aagacgguagcuucugcaguu

SEQ ID NO: 80133 - RNA, 21 nt, Artificial Sequence
  Chemically synthesized
cggccauuuccuguuucucug

SEQ ID NO: 80134 - RNA, 21 nt, Artificial Sequence
  Chemically synthesized
uguuugacgaagcgauccgag

SEQ ID NO: 80135 - RNA, 21 nt, Artificial Sequence
  Chemically synthesized
guguuugacgaagcgauccga

SEQ ID NO: 80136 - RNA, 21 nt, Artificial Sequence
  Chemically synthesized
uagugggaacuaaacuugauc

SEQ ID NO: 80137 - RNA, 21 nt, Artificial Sequence
  Chemically synthesized
caaagugguauccugaggugc

SEQ ID NO: 80138 - RNA, 21 nt, Artificial Sequence
  Chemically synthesized
gagaauauaucccuacugucu

SEQ ID NO: 80139 - RNA, 21 nt, Artificial Sequence
  Chemically synthesized
caaccaaugcauuuccuggag

SEQ ID NO: 80140 - RNA, 21 nt, Artificial Sequence
  Chemically synthesized
aucaguuacacaaccaaugca

SEQ ID NO: 80141 - RNA, 21 nt, Artificial Sequence
  Chemically synthesized
guaaaaaucauguguugcagc

SEQ ID NO: 80142 - RNA, 21 nt, Artificial Sequence
  Chemically synthesized
ucugucaaaugcaguagauga

SEQ ID NO: 80143 - RNA, 21 nt, Artificial Sequence
  Chemically synthesized
acaaaauacgaaguggagauu

SEQ ID NO: 80144 - RNA, 21 nt, Artificial Sequence
  Chemically synthesized
ugauuucauagcgaguuuucu

SEQ ID NO: 80145 - RNA, 21 nt, Artificial Sequence
  Chemically synthesized
cuccuauguaguucucagaug

SEQ ID NO: 80146 - RNA, 21 nt, Artificial Sequence
  Chemically synthesized
guagcuucugcaguuaggagg

SEQ ID NO: 80147 - RNA, 21 nt, Artificial Sequence
  Chemically synthesized
gaagacgguagcuucugcagu

SEQ ID NO: 80148 - RNA, 21 nt, Artificial Sequence
  Chemically synthesized
ccuucgcacucaaugccaacu

SEQ ID NO: 80149 - RNA, 21 nt, Artificial Sequence
  Chemically synthesized
aagcugacucccaucaccuau

SEQ ID NO: 80150 - RNA, 21 nt, Artificial Sequence
  Chemically synthesized
acugucccaacacucccauca

SEQ ID NO: 80151 - RNA, 21 nt, Artificial Sequence
  Chemically synthesized
uuaugguagauggaaaaccgg

SEQ ID NO: 80152 - RNA, 21 nt, Artificial Sequence
  Chemically synthesized
aguugcagaauuguggagugu

SEQ ID NO: 80153 - RNA, 21 nt, Artificial Sequence
  Chemically synthesized
uuaguaaaagugcuuuccaug

SEQ ID NO: 80154 - RNA, 21 nt, Artificial Sequence
  Chemically synthesized
gguaaaacuugccuacugauc

SEQ ID NO: 80155 - RNA, 21 nt, Artificial Sequence
  Chemically synthesized
aacucaccagugaguuagcag

SEQ ID NO: 80156 - RNA, 21 nt, Artificial Sequence
  Chemically synthesized
agaagaggaagagaaaaugcc

SEQ ID NO: 80157 - RNA, 21 nt, Artificial Sequence
  Chemically synthesized
gcaguuuuccucagcuuuggg

SEQ ID NO: 80158 - RNA, 21 nt, Artificial Sequence
  Chemically synthesized
ugacaauuauucugccaaugu

SEQ ID NO: 80159 - RNA, 21 nt, Artificial Sequence
  Chemically synthesized
acaaccaaugcauuuccugga

SEQ ID NO: 80160 - RNA, 21 nt, Artificial Sequence
  Chemically synthesized
ucugugagguucuguaaacug

SEQ ID NO: 80161 - RNA, 21 nt, Artificial Sequence
  Chemically synthesized
uuugggucugugagguucugu

SEQ ID NO: 80162 - RNA, 21 nt, Artificial Sequence
  Chemically synthesized
cugucuugccagauuaccgac

SEQ ID NO: 80163 - RNA, 21 nt, Artificial Sequence
  Chemically synthesized
cgcuaacuuaguaagugcuuu

SEQ ID NO: 80164 - RNA, 21 nt, Artificial Sequence
  Chemically synthesized
augugaguggagcggccauuu

SEQ ID NO: 80165 - RNA, 21 nt, Artificial Sequence
  Chemically synthesized
uaaacugguuguucuguuagu

SEQ ID NO: 80166 - RNA, 21 nt, Artificial Sequence
  Chemically synthesized
guggagauuuacacuacauug

SEQ ID NO: 80167 - RNA, 21 nt, Artificial Sequence
  Chemically synthesized
cagaugcguaaagcagaacag

SEQ ID NO: 80168 - RNA, 21 nt, Artificial Sequence
  Chemically synthesized
agaagacgguagcuucugcag

SEQ ID NO: 80169 - RNA, 21 nt, Artificial Sequence
  Chemically synthesized
aaagaccuucgucuuugagaa

SEQ ID NO: 80170 - RNA, 21 nt, Artificial Sequence
  Chemically synthesized
aguugccaaaauaccuucuga

SEQ ID NO: 80171 - RNA, 21 nt, Artificial Sequence
  Chemically synthesized
gacaagccuucuuaaagccuu

SEQ ID NO: 80172 - RNA, 21 nt, Artificial Sequence
  Chemically synthesized
gccucaagacaguguuugacg

SEQ ID NO: 80173 - RNA, 21 nt, Artificial Sequence
  Chemically synthesized
cauggcuaaggagauuggugc

SEQ ID NO: 80174 - RNA, 21 nt, Artificial Sequence
  Chemically synthesized
ccugcaucauuugaaaauguc

SEQ ID NO: 80175 - RNA, 21 nt, Artificial Sequence
  Chemically synthesized
ucugcaguuuuccucagcuuu

SEQ ID NO: 80176 - RNA, 21 nt, Artificial Sequence
  Chemically synthesized
gcuuaugggauacagcuggac

SEQ ID NO: 80177 - RNA, 21 nt, Artificial Sequence
  Chemically synthesized
ugggcuuaugggauacagcug

SEQ ID NO: 80178 - RNA, 21 nt, Artificial Sequence
  Chemically synthesized
uacaacuuaacucacuggcga

SEQ ID NO: 80179 - RNA, 21 nt, Artificial Sequence
  Chemically synthesized
cuguacaacuuaacucacugg

SEQ ID NO: 80180 - RNA, 21 nt, Artificial Sequence
  Chemically synthesized
guucuguacaacuuaacucac

SEQ ID NO: 80181 - RNA, 21 nt, Artificial Sequence
  Chemically synthesized
ugaucaguuacacaaccaaug

SEQ ID NO: 80182 - RNA, 21 nt, Artificial Sequence
  Chemically synthesized
acugucuugccagauuaccga

SEQ ID NO: 80183 - RNA, 21 nt, Artificial Sequence
  Chemically synthesized
cacugucuugccagauuaccg

SEQ ID NO: 80184 - RNA, 21 nt, Artificial Sequence
  Chemically synthesized
aucacugucuugccagauuac

SEQ ID NO: 80185 - RNA, 21 nt, Artificial Sequence
  Chemically synthesized
cugauaaugcauuagaagguu

SEQ ID NO: 80186 - RNA, 21 nt, Artificial Sequence
  Chemically synthesized
gucgcuaacuuaguaagugcu

SEQ ID NO: 80187 - RNA, 21 nt, Artificial Sequence
  Chemically synthesized
uugacaaaauacgaaguggag

SEQ ID NO: 80188 - RNA, 21 nt, Artificial Sequence
  Chemically synthesized
augaagcguugccauugaacu

SEQ ID NO: 80189 - RNA, 21 nt, Artificial Sequence
  Chemically synthesized
cuguuguaaaugucucagccc

SEQ ID NO: 80190 - RNA, 21 nt, Artificial Sequence
  Chemically synthesized
aagaggaagagaaaaugccug

SEQ ID NO: 80191 - RNA, 21 nt, Artificial Sequence
  Chemically synthesized
aucaccuauccgcagggucua

SEQ ID NO: 80192 - RNA, 21 nt, Artificial Sequence
  Chemically synthesized
acugaaggagaagaagcugac

SEQ ID NO: 80193 - RNA, 21 nt, Artificial Sequence
  Chemically synthesized
gaugcaggccaucaagugugu

SEQ ID NO: 80194 - RNA, 21 nt, Artificial Sequence
  Chemically synthesized
guaaacugugcuagugcugac

SEQ ID NO: 80195 - RNA, 21 nt, Artificial Sequence
  Chemically synthesized
auuaccgacacugucacuuga

SEQ ID NO: 80196 - RNA, 21 nt, Artificial Sequence
  Chemically synthesized
ucuugccagauuaccgacacu

SEQ ID NO: 80197 - RNA, 21 nt, Artificial Sequence
  Chemically synthesized
uccauguuacuuuauucagag

SEQ ID NO: 80198 - RNA, 21 nt, Artificial Sequence
  Chemically synthesized
cauuagaagguuuuuuugucg

SEQ ID NO: 80199 - RNA, 21 nt, Artificial Sequence
  Chemically synthesized
aacuugccuacugaucaguua

SEQ ID NO: 80200 - RNA, 21 nt, Artificial Sequence
  Chemically synthesized
cuguaauggagugagcguagc

SEQ ID NO: 80201 - RNA, 21 nt, Artificial Sequence
  Chemically synthesized
gagaacaccgagcacugaacu

SEQ ID NO: 80202 - RNA, 21 nt, Artificial Sequence
  Chemically synthesized
gugcaaagugguauccugagg

SEQ ID NO: 80203 - RNA, 21 nt, Artificial Sequence
  Chemically synthesized
ucccuugugaguccugcauca

SEQ ID NO: 80204 - RNA, 21 nt, Artificial Sequence
  Chemically synthesized
uguucuuaauuugcuuuuccc

SEQ ID NO: 80205 - RNA, 21 nt, Artificial Sequence
  Chemically synthesized
uugcagaauuguggaguguuu

SEQ ID NO: 80206 - RNA, 21 nt, Artificial Sequence
  Chemically synthesized
agugcugacgauguucuguac

SEQ ID NO: 80207 - RNA, 21 nt, Artificial Sequence
  Chemically synthesized
acacaaccaaugcauuuccug

SEQ ID NO: 80208 - RNA, 21 nt, Artificial Sequence
  Chemically synthesized
cuuaacaucacugucuugcca

SEQ ID NO: 80209 - RNA, 21 nt, Artificial Sequence
  Chemically synthesized
ccuucugacugagcaauaugc

SEQ ID NO: 80210 - RNA, 21 nt, Artificial Sequence
  Chemically synthesized
guuagucgcuaacuuaguaag

SEQ ID NO: 80211 - RNA, 21 nt, Artificial Sequence
  Chemically synthesized
aacugguuguucuguuagucg

SEQ ID NO: 80212 - RNA, 21 nt, Artificial Sequence
  Chemically synthesized
ugucaaaugcaguagaugaug

SEQ ID NO: 80213 - RNA, 21 nt, Artificial Sequence
  Chemically synthesized
guuaauuucugucaaaugcag

SEQ ID NO: 80214 - RNA, 21 nt, Artificial Sequence
  Chemically synthesized
aauggagugagcguagcagcu

SEQ ID NO: 80215 - RNA, 21 nt, Artificial Sequence
  Chemically synthesized
gaacucaccagugaguuagca

SEQ ID NO: 80216 - RNA, 21 nt, Artificial Sequence
  Chemically synthesized
uacacugcauuguugugccga

SEQ ID NO: 80217 - RNA, 21 nt, Artificial Sequence
  Chemically synthesized
aaaauaccuucugaacuacac

SEQ ID NO: 80218 - RNA, 21 nt, Artificial Sequence
  Chemically synthesized
aagaguugccaaaauaccuuc

SEQ ID NO: 80219 - RNA, 21 nt, Artificial Sequence
  Chemically synthesized
uguucagauuaagaguugcca

SEQ ID NO: 80220 - RNA, 21 nt, Artificial Sequence
  Chemically synthesized
auggcuaaggagauuggugcu

SEQ ID NO: 80221 - RNA, 21 nt, Artificial Sequence
  Chemically synthesized
auccuagugggaacuaaacuu

SEQ ID NO: 80222 - RNA, 21 nt, Artificial Sequence
  Chemically synthesized
ucauccuagugggaacuaaac

SEQ ID NO: 80223 - RNA, 21 nt, Artificial Sequence
  Chemically synthesized
agaagauuaugacagauuacg

SEQ ID NO: 80224 - RNA, 21 nt, Artificial Sequence
  Chemically synthesized
auggaaaaccggugaaucugg

SEQ ID NO: 80225 - RNA, 21 nt, Artificial Sequence
  Chemically synthesized
gacaauuauucugccaauguu

SEQ ID NO: 80226 - RNA, 21 nt, Artificial Sequence
  Chemically synthesized
cuguuucucugcaguuuuccu

SEQ ID NO: 80227 - RNA, 21 nt, Artificial Sequence
  Chemically synthesized
cuggagaauauaucccuacug

SEQ ID NO: 80228 - RNA, 21 nt, Artificial Sequence
  Chemically synthesized
cuagugcugacgauguucugu

SEQ ID NO: 80229 - RNA, 21 nt, Artificial Sequence
  Chemically synthesized
uauucagagcuaauaagugcu

SEQ ID NO: 80230 - RNA, 21 nt, Artificial Sequence
  Chemically synthesized
aaaacuugccuacugaucagu

SEQ ID NO: 80231 - RNA, 21 nt, Artificial Sequence
  Chemically synthesized
uaagcuuuuccuuucucuuac

SEQ ID NO: 80232 - RNA, 21 nt, Artificial Sequence
  Chemically synthesized
agaaagguugguauuaucagg

SEQ ID NO: 80233 - RNA, 21 nt, Artificial Sequence
  Chemically synthesized
uguacaaggaaugaaaguguc

SEQ ID NO: 80234 - RNA, 21 nt, Artificial Sequence
  Chemically synthesized
agcuguagguaaaacuugccu

SEQ ID NO: 80235 - RNA, 21 nt, Artificial Sequence
  Chemically synthesized
ccauuuccuguuucucugcag

SEQ ID NO: 80236 - RNA, 21 nt, Artificial Sequence
  Chemically synthesized
cucaccagugaguuagcagca

SEQ ID NO: 80237 - RNA, 21 nt, Artificial Sequence
  Chemically synthesized
ugaacucaccagugaguuagc

SEQ ID NO: 80238 - RNA, 21 nt, Artificial Sequence
  Chemically synthesized
ucgucuuugagaagacgguag

SEQ ID NO: 80239 - RNA, 21 nt, Artificial Sequence
  Chemically synthesized
agauuggugcuguaaaauacc

SEQ ID NO: 80240 - RNA, 21 nt, Artificial Sequence
  Chemically synthesized
gaucuuagggaugauaaagac

SEQ ID NO: 80241 - RNA, 21 nt, Artificial Sequence
  Chemically synthesized
accggugaaucugggcuuaug

SEQ ID NO: 80242 - RNA, 21 nt, Artificial Sequence
  Chemically synthesized
uucugccaauguuaugguaga

SEQ ID NO: 80243 - RNA, 21 nt, Artificial Sequence
  Chemically synthesized
ucuuugacaauuauucugcca

SEQ ID NO: 80244 - RNA, 21 nt, Artificial Sequence
  Chemically synthesized
uggagaauauaucccuacugu

SEQ ID NO: 80245 - RNA, 21 nt, Artificial Sequence
  Chemically synthesized
ugcuagugcugacgauguucu

SEQ ID NO: 80246 - RNA, 21 nt, Artificial Sequence
  Chemically synthesized
gugagguucuguaaacugugc

SEQ ID NO: 80247 - RNA, 21 nt, Artificial Sequence
  Chemically synthesized
uuagcgacuaacagaacaacc

SEQ ID NO: 80248 - RNA, 21 nt, Artificial Sequence
  Chemically synthesized
agguaaagagggucaguauug

SEQ ID NO: 80249 - RNA, 21 nt, Artificial Sequence
  Chemically synthesized
uuuccaucuaccauaacauug

SEQ ID NO: 80250 - RNA, 21 nt, Artificial Sequence
  Chemically synthesized
uucucuuccucuucuucacgg

SEQ ID NO: 80251 - RNA, 21 nt, Artificial Sequence
  Chemically synthesized
uuucucuuccucuucuucacg

SEQ ID NO: 80252 - RNA, 21 nt, Artificial Sequence
  Chemically synthesized
uacaauguaguguaaaucucc

SEQ ID NO: 80253 - RNA, 21 nt, Artificial Sequence
  Chemically synthesized
uuacccgugacacuuucauuc

SEQ ID NO: 80254 - RNA, 21 nt, Artificial Sequence
  Chemically synthesized
uuucucgaucgugucuuuauc

SEQ ID NO: 80255 - RNA, 21 nt, Artificial Sequence
  Chemically synthesized
uuuacagcaccaaucuccuua

SEQ ID NO: 80256 - RNA, 21 nt, Artificial Sequence
  Chemically synthesized
uagaguuuuuacccgugacac

SEQ ID NO: 80257 - RNA, 21 nt, Artificial Sequence
  Chemically synthesized
uugcacggacauuuucaaaug

SEQ ID NO: 80258 - RNA, 21 nt, Artificial Sequence
  Chemically synthesized
aaccuuuuagaguuuuuaccc

SEQ ID NO: 80259 - RNA, 21 nt, Artificial Sequence
  Chemically synthesized
ucugucauaaucuucuugucc

SEQ ID NO: 80260 - RNA, 21 nt, Artificial Sequence
  Chemically synthesized
ucccauaagcccagauucacc

SEQ ID NO: 80261 - RNA, 21 nt, Artificial Sequence
  Chemically synthesized
uucuccuucaguuucucgauc

SEQ ID NO: 80262 - RNA, 21 nt, Artificial Sequence
  Chemically synthesized
ucaggauaccacuuugcacgg

SEQ ID NO: 80263 - RNA, 21 nt, Artificial Sequence
  Chemically synthesized
ucgaucgugucuuuaucaucc

SEQ ID NO: 80264 - RNA, 21 nt, Artificial Sequence
  Chemically synthesized
uucucgaucgugucuuuauca

SEQ ID NO: 80265 - RNA, 21 nt, Artificial Sequence
  Chemically synthesized
uacccgugacacuuucauucc

SEQ ID NO: 80266 - RNA, 21 nt, Artificial Sequence
  Chemically synthesized
gguaaagagggucaguauugg

SEQ ID NO: 80267 - RNA, 21 nt, Artificial Sequence
  Chemically synthesized
ucuucuuguccagcuguaucc

SEQ ID NO: 80268 - RNA, 21 nt, Artificial Sequence
  Chemically synthesized
uucauuagaggaaauagcagu

SEQ ID NO: 80269 - RNA, 21 nt, Artificial Sequence
  Chemically synthesized
acuuucauuccuuguacaaug

SEQ ID NO: 80270 - RNA, 21 nt, Artificial Sequence
  Chemically synthesized
uucaguuucucgaucgugucu

SEQ ID NO: 80271 - RNA, 21 nt, Artificial Sequence
  Chemically synthesized
ucuuuaucaucccuaagauca

SEQ ID NO: 80272 - RNA, 21 nt, Artificial Sequence
  Chemically synthesized
ucaaaaucuccgcaaaagcug

SEQ ID NO: 80273 - RNA, 21 nt, Artificial Sequence
  Chemically synthesized
cucaggauaccacuuugcacg

SEQ ID NO: 80274 - RNA, 21 nt, Artificial Sequence
  Chemically synthesized
ucacagacccaaaggaacauc

SEQ ID NO: 80275 - RNA, 21 nt, Artificial Sequence
  Chemically synthesized
uguaguguaaaucuccacuuc

SEQ ID NO: 80276 - RNA, 21 nt, Artificial Sequence
  Chemically synthesized
ucucaaagacgaaggucuuug

SEQ ID NO: 80277 - RNA, 21 nt, Artificial Sequence
  Chemically synthesized
auaauugucaaagacaguagg

SEQ ID NO: 80278 - RNA, 21 nt, Artificial Sequence
  Chemically synthesized
auaaaguaacauggaaagcac

SEQ ID NO: 80279 - RNA, 21 nt, Artificial Sequence
  Chemically synthesized
uaacauggaaagcacuuuuac

SEQ ID NO: 80280 - RNA, 21 nt, Artificial Sequence
  Chemically synthesized
uuuuagaguuuuuacccguga

SEQ ID NO: 80281 - RNA, 21 nt, Artificial Sequence
  Chemically synthesized
uuuagaguuuuuacccgugac

SEQ ID NO: 80282 - RNA, 21 nt, Artificial Sequence
  Chemically synthesized
uacugucuuuguccuuugauc

SEQ ID NO: 80283 - RNA, 21 nt, Artificial Sequence
  Chemically synthesized
uccuaacugcagaagcuaccg

SEQ ID NO: 80284 - RNA, 21 nt, Artificial Sequence
  Chemically synthesized
uuugcaaaguucagugcucgg

SEQ ID NO: 80285 - RNA, 21 nt, Artificial Sequence
  Chemically synthesized
uaccacuuugcacggacauuu

SEQ ID NO: 80286 - RNA, 21 nt, Artificial Sequence
  Chemically synthesized
ugcaaaguucagugcucggug

SEQ ID NO: 80287 - RNA, 21 nt, Artificial Sequence
  Chemically synthesized
ucaguuucucgaucgugucuu

SEQ ID NO: 80288 - RNA, 21 nt, Artificial Sequence
  Chemically synthesized
guuuuuacccgugacacuuuc

SEQ ID NO: 80289 - RNA, 21 nt, Artificial Sequence
  Chemically synthesized
ucaaaauacugucuuuguccu

SEQ ID NO: 80290 - RNA, 21 nt, Artificial Sequence
  Chemically synthesized
auuuucucuuccucuucuuca

SEQ ID NO: 80291 - RNA, 21 nt, Artificial Sequence
  Chemically synthesized
aucgcuucgucaaacacuguc

SEQ ID NO: 80292 - RNA, 21 nt, Artificial Sequence
  Chemically synthesized
uuaguucccacuaggaugaug

SEQ ID NO: 80293 - RNA, 21 nt, Artificial Sequence
  Chemically synthesized
acacgugcugcuaacucacug

SEQ ID NO: 80294 - RNA, 21 nt, Artificial Sequence
  Chemically synthesized
ucauaaucuucuuguccagcu

SEQ ID NO: 80295 - RNA, 21 nt, Artificial Sequence
  Chemically synthesized
uucuuguccagcuguauccca

SEQ ID NO: 80296 - RNA, 21 nt, Artificial Sequence
  Chemically synthesized
uguaaaaacacuccacaauuc

SEQ ID NO: 80297 - RNA, 21 nt, Artificial Sequence
  Chemically synthesized
ugucuuuguccuuugaucaca

SEQ ID NO: 80298 - RNA, 21 nt, Artificial Sequence
  Chemically synthesized
cuaacugcagaagcuaccguc

SEQ ID NO: 80299 - RNA, 21 nt, Artificial Sequence
  Chemically synthesized
uuuucucuuccucuucuucac

SEQ ID NO: 80300 - RNA, 21 nt, Artificial Sequence
  Chemically synthesized
uaauugucaaagacaguaggg

SEQ ID NO: 80301 - RNA, 21 nt, Artificial Sequence
  Chemically synthesized
ugcuacgcucacuccauuaca

SEQ ID NO: 80302 - RNA, 21 nt, Artificial Sequence
  Chemically synthesized
ucacuccauuacaguacaaug

SEQ ID NO: 80303 - RNA, 21 nt, Artificial Sequence
  Chemically synthesized
uuacgcaucugagaacuacau

SEQ ID NO: 80304 - RNA, 21 nt, Artificial Sequence
  Chemically synthesized
auuuucaaaugaugcaggacu

SEQ ID NO: 80305 - RNA, 21 nt, Artificial Sequence
  Chemically synthesized
uguuguaguggcugaaggguc

SEQ ID NO: 80306 - RNA, 21 nt, Artificial Sequence
  Chemically synthesized
uuacuaaguuagcgacuaaca

SEQ ID NO: 80307 - RNA, 21 nt, Artificial Sequence
  Chemically synthesized
uaaguuagcgacuaacagaac

SEQ ID NO: 80308 - RNA, 21 nt, Artificial Sequence
  Chemically synthesized
ucuuaaucugaacaagaaugg

SEQ ID NO: 80309 - RNA, 21 nt, Artificial Sequence
  Chemically synthesized
uuggcagaauaauugucaaag

SEQ ID NO: 80310 - RNA, 21 nt, Artificial Sequence
  Chemically synthesized
uaaggaaagcacuuauuagcu

SEQ ID NO: 80311 - RNA, 21 nt, Artificial Sequence
  Chemically synthesized
uuuuuacccgugacacuuuca

SEQ ID NO: 80312 - RNA, 21 nt, Artificial Sequence
  Chemically synthesized
aucuccacuucguauuuuguc

SEQ ID NO: 80313 - RNA, 21 nt, Artificial Sequence
  Chemically synthesized
aaauacugucuuuguccuuug

SEQ ID NO: 80314 - RNA, 21 nt, Artificial Sequence
  Chemically synthesized
cuucuuguccagcuguauccc

SEQ ID NO: 80315 - RNA, 21 nt, Artificial Sequence
  Chemically synthesized
auauauucuccaggaaaugca

SEQ ID NO: 80316 - RNA, 21 nt, Artificial Sequence
  Chemically synthesized
uauucuccaggaaaugcauug

SEQ ID NO: 80317 - RNA, 21 nt, Artificial Sequence
  Chemically synthesized
ucaauaggcaaagcgacuaca

SEQ ID NO: 80318 - RNA, 21 nt, Artificial Sequence
  Chemically synthesized
uggaaagcacuuuuacuaauc

SEQ ID NO: 80319 - RNA, 21 nt, Artificial Sequence
  Chemically synthesized
uuagaguuuuuacccgugaca

SEQ ID NO: 80320 - RNA, 21 nt, Artificial Sequence
  Chemically synthesized
ucuccacuucguauuuuguca

SEQ ID NO: 80321 - RNA, 21 nt, Artificial Sequence
  Chemically synthesized
uccacuucguauuuugucaaa

SEQ ID NO: 80322 - RNA, 21 nt, Artificial Sequence
  Chemically synthesized
ugucaaaauacugucuuuguc

SEQ ID NO: 80323 - RNA, 21 nt, Artificial Sequence
  Chemically synthesized
acucgcuaugaaaucacaaag

SEQ ID NO: 80324 - RNA, 21 nt, Artificial Sequence
  Chemically synthesized
aauagaaugugagucugaacu

SEQ ID NO: 80325 - RNA, 21 nt, Artificial Sequence
  Chemically synthesized
aucuucuuguccagcuguauc

SEQ ID NO: 80326 - RNA, 21 nt, Artificial Sequence
  Chemically synthesized
uuccaucuaccauaacauugg

SEQ ID NO: 80327 - RNA, 21 nt, Artificial Sequence
  Chemically synthesized
ucaucaucuacugcauuugac

SEQ ID NO: 80328 - RNA, 21 nt, Artificial Sequence
  Chemically synthesized
accuuuuagaguuuuuacccg

SEQ ID NO: 80329 - RNA, 21 nt, Artificial Sequence
  Chemically synthesized
uguaaaucuccacuucguauu

SEQ ID NO: 80330 - RNA, 21 nt, Artificial Sequence
  Chemically synthesized
uucauucgggaggcuguucug

SEQ ID NO: 80331 - RNA, 21 nt, Artificial Sequence
  Chemically synthesized
uuggcaacucuuaaucugaac

SEQ ID NO: 80332 - RNA, 21 nt, Artificial Sequence
  Chemically synthesized
uuugcacggacauuuucaaau

SEQ ID NO: 80333 - RNA, 21 nt, Artificial Sequence
  Chemically synthesized
uacagaacaucgucagcacua

SEQ ID NO: 80334 - RNA, 21 nt, Artificial Sequence
  Chemically synthesized
uuuggcaacucuuaaucugaa

SEQ ID NO: 80335 - RNA, 21 nt, Artificial Sequence
  Chemically synthesized
aaagacaguagggauauauuc

SEQ ID NO: 80336 - RNA, 21 nt, Artificial Sequence
  Chemically synthesized
uugguuguguaacugaucagu

SEQ ID NO: 80337 - RNA, 21 nt, Artificial Sequence
  Chemically synthesized
uaaaguaacauggaaagcacu

SEQ ID NO: 80338 - RNA, 21 nt, Artificial Sequence
  Chemically synthesized
aguaacauggaaagcacuuuu

SEQ ID NO: 80339 - RNA, 21 nt, Artificial Sequence
  Chemically synthesized
uacuaaguuagcgacuaacag

SEQ ID NO: 80340 - RNA, 21 nt, Artificial Sequence
  Chemically synthesized
uuuacccgugacacuuucauu

SEQ ID NO: 80341 - RNA, 21 nt, Artificial Sequence
  Chemically synthesized
ugggagucagcuucuucuccu

SEQ ID NO: 80342 - RNA, 21 nt, Artificial Sequence
  Chemically synthesized
uccagcuguaucccauaagcc

SEQ ID NO: 80343 - RNA, 21 nt, Artificial Sequence
  Chemically synthesized
ugcaacacaugauuuuuacac

SEQ ID NO: 80344 - RNA, 21 nt, Artificial Sequence
  Chemically synthesized
acugucuuuguccuuugauca

SEQ ID NO: 80345 - RNA, 21 nt, Artificial Sequence
  Chemically synthesized
uacgcaucugagaacuacaua

SEQ ID NO: 80346 - RNA, 21 nt, Artificial Sequence
  Chemically synthesized
acaaaaaguuggcauugagug

SEQ ID NO: 80347 - RNA, 21 nt, Artificial Sequence
  Chemically synthesized
ucaaacacugucuugaggccu

SEQ ID NO: 80348 - RNA, 21 nt, Artificial Sequence
  Chemically synthesized
ucagcuucuucuccuucaguu

SEQ ID NO: 80349 - RNA, 21 nt, Artificial Sequence
  Chemically synthesized
aucgugucuuuaucaucccua

SEQ ID NO: 80350 - RNA, 21 nt, Artificial Sequence
  Chemically synthesized
uaggaugaugggaguguuggg

SEQ ID NO: 80351 - RNA, 21 nt, Artificial Sequence
  Chemically synthesized
ucaaaugaugcaggacucaca

SEQ ID NO: 80352 - RNA, 21 nt, Artificial Sequence
  Chemically synthesized
uccaucuaccauaacauuggc

SEQ ID NO: 80353 - RNA, 21 nt, Artificial Sequence
  Chemically synthesized
uucugcuuuacgcaucugaga

SEQ ID NO: 80354 - RNA, 21 nt, Artificial Sequence
  Chemically synthesized
ucugcuuuacgcaucugagaa

SEQ ID NO: 80355 - RNA, 21 nt, Artificial Sequence
  Chemically synthesized
ugcuuuacgcaucugagaacu

SEQ ID NO: 80356 - RNA, 21 nt, Artificial Sequence
  Chemically synthesized
uaacugcagaagcuaccgucu

SEQ ID NO: 80357 - RNA, 21 nt, Artificial Sequence
  Chemically synthesized
uaucccauaagcccagauuca

SEQ ID NO: 80358 - RNA, 21 nt, Artificial Sequence
  Chemically synthesized
uauauucuccaggaaaugcau

SEQ ID NO: 80359 - RNA, 21 nt, Artificial Sequence
  Chemically synthesized
ugaagggucccacgcuguauu

SEQ ID NO: 80360 - RNA, 21 nt, Artificial Sequence
  Chemically synthesized
acaguuuacagaaccucacag

SEQ ID NO: 80361 - RNA, 21 nt, Artificial Sequence
  Chemically synthesized
cuaaucgacaaaaaaaccuuc

SEQ ID NO: 80362 - RNA, 21 nt, Artificial Sequence
  Chemically synthesized
aaaagcacuuacuaaguuagc

SEQ ID NO: 80363 - RNA, 21 nt, Artificial Sequence
  Chemically synthesized
ugaucaguaggcaaguuuuac

SEQ ID NO: 80364 - RNA, 21 nt, Artificial Sequence
  Chemically synthesized
ucuuucaucaucuacugcauu

SEQ ID NO: 80365 - RNA, 21 nt, Artificial Sequence
  Chemically synthesized
uuuguccuuugaucacacaca

SEQ ID NO: 80366 - RNA, 21 nt, Artificial Sequence
  Chemically synthesized
ugcagaagcuaccgucuucuc

SEQ ID NO: 80367 - RNA, 21 nt, Artificial Sequence
  Chemically synthesized
uaggcaaagcgacuacaggag

SEQ ID NO: 80368 - RNA, 21 nt, Artificial Sequence
  Chemically synthesized
guccuuugaucacacacaccc

SEQ ID NO: 80369 - RNA, 21 nt, Artificial Sequence
  Chemically synthesized
cuuugcaaaguucagugcucg

SEQ ID NO: 80370 - RNA, 21 nt, Artificial Sequence
  Chemically synthesized
aguuuaguucccacuaggaug

SEQ ID NO: 80371 - RNA, 21 nt, Artificial Sequence
  Chemically synthesized
uucuccaggaaaugcauuggu

SEQ ID NO: 80372 - RNA, 21 nt, Artificial Sequence
  Chemically synthesized
ccuuucuuucaucaucuacug

SEQ ID NO: 80373 - RNA, 21 nt, Artificial Sequence
  Chemically synthesized
gucuuuguccuuugaucacac

SEQ ID NO: 80374 - RNA, 21 nt, Artificial Sequence
  Chemically synthesized
uugcaaaguucagugcucggu

SEQ ID NO: 80375 - RNA, 21 nt, Artificial Sequence
  Chemically synthesized
uguaacaaaaaguuggcauug

SEQ ID NO: 80376 - RNA, 21 nt, Artificial Sequence
  Chemically synthesized
ucucgaucgugucuuuaucau

SEQ ID NO: 80377 - RNA, 21 nt, Artificial Sequence
  Chemically synthesized
ucuccaggaaaugcauugguu

SEQ ID NO: 80378 - RNA, 21 nt, Artificial Sequence
  Chemically synthesized
aucgucagcacuagcacaguu

SEQ ID NO: 80379 - RNA, 21 nt, Artificial Sequence
  Chemically synthesized
aaugcauugguuguguaacug

SEQ ID NO: 80380 - RNA, 21 nt, Artificial Sequence
  Chemically synthesized
aucacaaagacugauccaaag

SEQ ID NO: 80381 - RNA, 21 nt, Artificial Sequence
  Chemically synthesized
ugaguucaauggcaacgcuuc

SEQ ID NO: 80382 - RNA, 21 nt, Artificial Sequence
  Chemically synthesized
uguucugcuuuacgcaucuga

SEQ ID NO: 80383 - RNA, 21 nt, Artificial Sequence
  Chemically synthesized
aaacacugucuugaggccucg

SEQ ID NO: 80384 - RNA, 21 nt, Artificial Sequence
  Chemically synthesized
ugucauaaucuucuuguccag

SEQ ID NO: 80385 - RNA, 21 nt, Artificial Sequence
  Chemically synthesized
uuguccagcuguaucccauaa

SEQ ID NO: 80386 - RNA, 21 nt, Artificial Sequence
  Chemically synthesized
uacagaaccucacagacccaa

SEQ ID NO: 80387 - RNA, 21 nt, Artificial Sequence
  Chemically synthesized
auaaagcugcaacacaugauu

SEQ ID NO: 80388 - RNA, 21 nt, Artificial Sequence
  Chemically synthesized
uaggcaaguuuuaccuacagc

SEQ ID NO: 80389 - RNA, 21 nt, Artificial Sequence
  Chemically synthesized
aauguaguguaaaucuccacu

SEQ ID NO: 80390 - RNA, 21 nt, Artificial Sequence
  Chemically synthesized
uucgggaggcuguucugcuuu

SEQ ID NO: 80391 - RNA, 21 nt, Artificial Sequence
  Chemically synthesized
auaaucuucuuguccagcugu

SEQ ID NO: 80392 - RNA, 21 nt, Artificial Sequence
  Chemically synthesized
ugaggaaaacugcagagaaac

SEQ ID NO: 80393 - RNA, 21 nt, Artificial Sequence
  Chemically synthesized
aagacaguagggauauauucu

SEQ ID NO: 80394 - RNA, 21 nt, Artificial Sequence
  Chemically synthesized
ucagaaaacucgcuaugaaau

SEQ ID NO: 80395 - RNA, 21 nt, Artificial Sequence
  Chemically synthesized
aaucacaaagacugauccaaa

SEQ ID NO: 80396 - RNA, 21 nt, Artificial Sequence
  Chemically synthesized
guucaauggcaacgcuucauu

SEQ ID NO: 80397 - RNA, 21 nt, Artificial Sequence
  Chemically synthesized
ugugagucugaacucuuacau

SEQ ID NO: 80398 - RNA, 21 nt, Artificial Sequence
  Chemically synthesized
uuggcauugagugcgaaggcu

SEQ ID NO: 80399 - RNA, 21 nt, Artificial Sequence
  Chemically synthesized
uuccaagggacaggaccaaga

SEQ ID NO: 80400 - RNA, 21 nt, Artificial Sequence
  Chemically synthesized
uucgucaaacacugucuugag

SEQ ID NO: 80401 - RNA, 21 nt, Artificial Sequence
  Chemically synthesized
agcacuccagguauuuuacag

SEQ ID NO: 80402 - RNA, 21 nt, Artificial Sequence
  Chemically synthesized
agaaacaggaaauggccgcuc

SEQ ID NO: 80403 - RNA, 21 nt, Artificial Sequence
  Chemically synthesized
agauucaccgguuuuccaucu

SEQ ID NO: 80404 - RNA, 21 nt, Artificial Sequence
  Chemically synthesized
aaaacuauaaagcugcaacac

SEQ ID NO: 80405 - RNA, 21 nt, Artificial Sequence
  Chemically synthesized
ccaaccuuucuuucaucaucu

SEQ ID NO: 80406 - RNA, 21 nt, Artificial Sequence
  Chemically synthesized
ucauuagaggaaauagcaguu

SEQ ID NO: 80407 - RNA, 21 nt, Artificial Sequence
  Chemically synthesized
ucuuccucuucuucacgggag

SEQ ID NO: 80408 - RNA, 21 nt, Artificial Sequence
  Chemically synthesized
ugaugggagucagcuucuucu

SEQ ID NO: 80409 - RNA, 21 nt, Artificial Sequence
  Chemically synthesized
gucauaaucuucuuguccagc

SEQ ID NO: 80410 - RNA, 21 nt, Artificial Sequence
  Chemically synthesized
ucuuguccagcuguaucccau

SEQ ID NO: 80411 - RNA, 21 nt, Artificial Sequence
  Chemically synthesized
aucccauaagcccagauucac

SEQ ID NO: 80412 - RNA, 21 nt, Artificial Sequence
  Chemically synthesized
accgguuuuccaucuaccaua

SEQ ID NO: 80413 - RNA, 21 nt, Artificial Sequence
  Chemically synthesized
auauucuccaggaaaugcauu

SEQ ID NO: 80414 - RNA, 21 nt, Artificial Sequence
  Chemically synthesized
acaauucugcaacugucaauu

SEQ ID NO: 80415 - RNA, 21 nt, Artificial Sequence
  Chemically synthesized
acaauguaguguaaaucucca

SEQ ID NO: 80416 - RNA, 21 nt, Artificial Sequence
  Chemically synthesized
aaaucuccacuucguauuuug

SEQ ID NO: 80417 - RNA, 21 nt, Artificial Sequence
  Chemically synthesized
gucaaaauacugucuuugucc

SEQ ID NO: 80418 - RNA, 21 nt, Artificial Sequence
  Chemically synthesized
ucuuuguccuuugaucacaca

SEQ ID NO: 80419 - RNA, 21 nt, Artificial Sequence
  Chemically synthesized
uguucaaaaucuccgcaaaag

SEQ ID NO: 80420 - RNA, 21 nt, Artificial Sequence
  Chemically synthesized
cacuccagguauuuuacagca

SEQ ID NO: 80421 - RNA, 21 nt, Artificial Sequence
  Chemically synthesized
accacuuugcacggacauuuu

SEQ ID NO: 80422 - RNA, 21 nt, Artificial Sequence
  Chemically synthesized
cuccacaauucugcaacuguc

SEQ ID NO: 80423 - RNA, 21 nt, Artificial Sequence
  Chemically synthesized
aacagaacaaccaguuuaaag

SEQ ID NO: 80424 - RNA, 21 nt, Artificial Sequence
  Chemically synthesized
cugauaauaccaaccuuucuu

SEQ ID NO: 80425 - RNA, 21 nt, Artificial Sequence
  Chemically synthesized
accuuucuuucaucaucuacu

SEQ ID NO: 80426 - RNA, 21 nt, Artificial Sequence
  Chemically synthesized
guacaauguaguguaaaucuc

SEQ ID NO: 80427 - RNA, 21 nt, Artificial Sequence
  Chemically synthesized
auguaguguaaaucuccacuu

SEQ ID NO: 80428 - RNA, 21 nt, Artificial Sequence
  Chemically synthesized
acgcucacuccauuacaguac

SEQ ID NO: 80429 - RNA, 21 nt, Artificial Sequence
  Chemically synthesized
cuccuaacugcagaagcuacc

SEQ ID NO: 80430 - RNA, 21 nt, Artificial Sequence
  Chemically synthesized
aaucuguaacaaaaaguuggc

SEQ ID NO: 80431 - RNA, 21 nt, Artificial Sequence
  Chemically synthesized
ucuucuccuucaguuucucga

SEQ ID NO: 80432 - RNA, 21 nt, Artificial Sequence
  Chemically synthesized
uccuucaguuucucgaucgug

SEQ ID NO: 80433 - RNA, 21 nt, Artificial Sequence
  Chemically synthesized
ucccuaagaucaaguuuaguu

SEQ ID NO: 80434 - RNA, 21 nt, Artificial Sequence
  Chemically synthesized
aucugucauaaucuucuuguc

SEQ ID NO: 80435 - RNA, 21 nt, Artificial Sequence
  Chemically synthesized
gacaguagggauauauucucc

SEQ ID NO: 80436 - RNA, 21 nt, Artificial Sequence
  Chemically synthesized
auucucgccagugaguuaagu

SEQ ID NO: 80437 - RNA, 21 nt, Artificial Sequence
  Chemically synthesized
aacuauaaagcugcaacacau

SEQ ID NO: 80438 - RNA, 21 nt, Artificial Sequence
  Chemically synthesized
gcucugaauaaaguaacaugg

SEQ ID NO: 80439 - RNA, 21 nt, Artificial Sequence
  Chemically synthesized
cuucauucgggaggcuguucu

SEQ ID NO: 80440 - RNA, 21 nt, Artificial Sequence
  Chemically synthesized
agaacuacauaggagagcaag

SEQ ID NO: 80441 - RNA, 21 nt, Artificial Sequence
  Chemically synthesized
cuuuaagaaggcuugucauuu

SEQ ID NO: 80442 - RNA, 21 nt, Artificial Sequence
  Chemically synthesized
ugagucugaacucuuacauuu

SEQ ID NO: 80443 - RNA, 21 nt, Artificial Sequence
  Chemically synthesized
ucucuuccucuucuucacggg

SEQ ID NO: 80444 - RNA, 21 nt, Artificial Sequence
  Chemically synthesized
ucaaagacaguagggauauau

SEQ ID NO: 80445 - RNA, 21 nt, Artificial Sequence
  Chemically synthesized
aguagggauauauucuccagg

SEQ ID NO: 80446 - RNA, 21 nt, Artificial Sequence
  Chemically synthesized
acuauaaagcugcaacacaug

SEQ ID NO: 80447 - RNA, 21 nt, Artificial Sequence
  Chemically synthesized
uauaaagcugcaacacaugau

SEQ ID NO: 80448 - RNA, 21 nt, Artificial Sequence
  Chemically synthesized
ucuguaacaaaaaguuggcau

SEQ ID NO: 80449 - RNA, 21 nt, Artificial Sequence
  Chemically synthesized
uacaaagguuccaagggacag

SEQ ID NO: 80450 - RNA, 21 nt, Artificial Sequence
  Chemically synthesized
uccagguauuuuacagcacca

SEQ ID NO: 80451 - RNA, 21 nt, Artificial Sequence
  Chemically synthesized
ucuccuuagccauggcuagac

SEQ ID NO: 80452 - RNA, 21 nt, Artificial Sequence
  Chemically synthesized
agcuucuucuccuucaguuuc

SEQ ID NO: 80453 - RNA, 21 nt, Artificial Sequence
  Chemically synthesized
cuucaguuucucgaucguguc

SEQ ID NO: 80454 - RNA, 21 nt, Artificial Sequence
  Chemically synthesized
ucgucagcacuagcacaguuu

SEQ ID NO: 80455 - RNA, 21 nt, Artificial Sequence
  Chemically synthesized
uagcgacuaacagaacaacca

SEQ ID NO: 80456 - RNA, 21 nt, Artificial Sequence
  Chemically synthesized
agcgacuaacagaacaaccag

SEQ ID NO: 80457 - RNA, 21 nt, Artificial Sequence
  Chemically synthesized
accaaccuuucuuucaucauc

SEQ ID NO: 80458 - RNA, 21 nt, Artificial Sequence
  Chemically synthesized
ucauuccuuguacaauguagu

SEQ ID NO: 80459 - RNA, 21 nt, Artificial Sequence
  Chemically synthesized
acgcaucugagaacuacauag

SEQ ID NO: 80460 - RNA, 21 nt, Artificial Sequence
  Chemically synthesized
agugucugcaccuccuaacug

SEQ ID NO: 80461 - RNA, 21 nt, Artificial Sequence
  Chemically synthesized
ucuuugcaaaguucagugcuc

SEQ ID NO: 80462 - RNA, 21 nt, Artificial Sequence
  Chemically synthesized
aucuguaacaaaaaguuggca

SEQ ID NO: 80463 - RNA, 21 nt, Artificial Sequence
  Chemically synthesized
cagguauuuuacagcaccaau

SEQ ID NO: 80464 - RNA, 21 nt, Artificial Sequence
  Chemically synthesized
ucgugucuuuaucaucccuaa

SEQ ID NO: 80465 - RNA, 21 nt, Artificial Sequence
  Chemically synthesized
ucaucccuaagaucaaguuua

SEQ ID NO: 80466 - RNA, 21 nt, Artificial Sequence
  Chemically synthesized
augaugggaguguugggacag

SEQ ID NO: 80467 - RNA, 21 nt, Artificial Sequence
  Chemically synthesized
uguaucccauaagcccagauu

SEQ ID NO: 80468 - RNA, 21 nt, Artificial Sequence
  Chemically synthesized
acaucgucagcacuagcacag

SEQ ID NO: 80469 - RNA, 21 nt, Artificial Sequence
  Chemically synthesized
aaaugcauugguuguguaacu

SEQ ID NO: 80470 - RNA, 21 nt, Artificial Sequence
  Chemically synthesized
ugguuguguaacugaucagua

SEQ ID NO: 80471 - RNA, 21 nt, Artificial Sequence
  Chemically synthesized
uguaacugaucaguaggcaag

SEQ ID NO: 80472 - RNA, 21 nt, Artificial Sequence
  Chemically synthesized
uaguguaaaucuccacuucgu

SEQ ID NO: 80473 - RNA, 21 nt, Artificial Sequence
  Chemically synthesized
acuccauuacaguacaauguu

SEQ ID NO: 80474 - RNA, 21 nt, Artificial Sequence
  Chemically synthesized
aacacgugcugcuaacucacu

SEQ ID NO: 80475 - RNA, 21 nt, Artificial Sequence
  Chemically synthesized
ugcagagaaacaggaaauggc

SEQ ID NO: 80476 - RNA, 21 nt, Artificial Sequence
  Chemically synthesized
uucccacuaggaugaugggag

SEQ ID NO: 80477 - RNA, 21 nt, Artificial Sequence
  Chemically synthesized
acggacauuuucaaaugaugc

SEQ ID NO: 80478 - RNA, 21 nt, Artificial Sequence
  Chemically synthesized
ugcuaauugcauuagcaaaag

SEQ ID NO: 80479 - RNA, 21 nt, Artificial Sequence
  Chemically synthesized
cuauaaagcugcaacacauga

SEQ ID NO: 80480 - RNA, 21 nt, Artificial Sequence
  Chemically synthesized
cuuuuagaguuuuuacccgug

SEQ ID NO: 80481 - RNA, 21 nt, Artificial Sequence
  Chemically synthesized
aguuuuuacccgugacacuuu

SEQ ID NO: 80482 - RNA, 21 nt, Artificial Sequence
  Chemically synthesized
uuuuacccgugacacuuucau

SEQ ID NO: 80483 - RNA, 21 nt, Artificial Sequence
  Chemically synthesized
cuuuguccuuugaucacacac

SEQ ID NO: 80484 - RNA, 21 nt, Artificial Sequence
  Chemically synthesized
agguauuuuacagcaccaauc

SEQ ID NO: 80485 - RNA, 21 nt, Artificial Sequence
  Chemically synthesized
ugucuuuaucaucccuaagau

SEQ ID NO: 80486 - RNA, 21 nt, Artificial Sequence
  Chemically synthesized
uaaucuucuuguccagcugua

SEQ ID NO: 80487 - RNA, 21 nt, Artificial Sequence
  Chemically synthesized
ucucgccagugaguuaaguug

SEQ ID NO: 80488 - RNA, 21 nt, Artificial Sequence
  Chemically synthesized
acaucaauaggcaaagcgacu

SEQ ID NO: 80489 - RNA, 21 nt, Artificial Sequence
  Chemically synthesized
agcucugaauaaaguaacaug

SEQ ID NO: 80490 - RNA, 21 nt, Artificial Sequence
  Chemically synthesized
ucuacugcauuugacagaaau

SEQ ID NO: 80491 - RNA, 21 nt, Artificial Sequence
  Chemically synthesized
cucuuaaucugaacaagaaug

SEQ ID NO: 80492 - RNA, 21 nt, Artificial Sequence
  Chemically synthesized
acuccagguauuuuacagcac

SEQ ID NO: 80493 - RNA, 21 nt, Artificial Sequence
  Chemically synthesized
guauuuuacagcaccaaucuc

SEQ ID NO: 80494 - RNA, 21 nt, Artificial Sequence
  Chemically synthesized
agagaaacaggaaauggccgc

SEQ ID NO: 80495 - RNA, 21 nt, Artificial Sequence
  Chemically synthesized
cuuugcacggacauuuucaaa

SEQ ID NO: 80496 - RNA, 21 nt, Artificial Sequence
  Chemically synthesized
aaaugaugcaggacucacaag

SEQ ID NO: 80497 - RNA, 21 nt, Artificial Sequence
  Chemically synthesized
aacaucgucagcacuagcaca

SEQ ID NO: 80498 - RNA, 21 nt, Artificial Sequence
  Chemically synthesized
agagggucaguauuggucaag

SEQ ID NO: 80499 - RNA, 21 nt, Artificial Sequence
  Chemically synthesized
acauggaaagcacuuuuacua

SEQ ID NO: 80500 - RNA, 21 nt, Artificial Sequence
  Chemically synthesized
acuaaguuagcgacuaacaga

SEQ ID NO: 80501 - RNA, 21 nt, Artificial Sequence
  Chemically synthesized
cuuucaucaucuacugcauuu

SEQ ID NO: 80502 - RNA, 21 nt, Artificial Sequence
  Chemically synthesized
cacagcuaaacagaauucuuc

SEQ ID NO: 80503 - RNA, 21 nt, Artificial Sequence
  Chemically synthesized
uacgcucacuccauuacagua

SEQ ID NO: 80504 - RNA, 21 nt, Artificial Sequence
  Chemically synthesized
ucacuggugaguucaauggca

SEQ ID NO: 80505 - RNA, 21 nt, Artificial Sequence
  Chemically synthesized
cuuuacgcaucugagaacuac

SEQ ID NO: 80506 - RNA, 21 nt, Artificial Sequence
  Chemically synthesized
acauaggagagcaagugucug

SEQ ID NO: 80507 - RNA, 21 nt, Artificial Sequence
  Chemically synthesized
ucuucucaaagacgaaggucu

SEQ ID NO: 80508 - RNA, 21 nt, Artificial Sequence
  Chemically synthesized
agucugaacucuuacauuuag

SEQ ID NO: 80509 - RNA, 21 nt, Artificial Sequence
  Chemically synthesized
uccaagggacaggaccaagaa

SEQ ID NO: 80510 - RNA, 21 nt, Artificial Sequence
  Chemically synthesized
auuuacaacagcaggcauuuu

SEQ ID NO: 80511 - RNA, 21 nt, Artificial Sequence
  Chemically synthesized
cuaggaugaugggaguguugg

SEQ ID NO: 80512 - RNA, 21 nt, Artificial Sequence
  Chemically synthesized
cacuuugcacggacauuuuca

SEQ ID NO: 80513 - RNA, 21 nt, Artificial Sequence
  Chemically synthesized
cugucauaaucuucuugucca

SEQ ID NO: 80514 - RNA, 21 nt, Artificial Sequence
  Chemically synthesized
aaaguaacauggaaagcacuu

SEQ ID NO: 80515 - RNA, 21 nt, Artificial Sequence
  Chemically synthesized
aacauggaaagcacuuuuacu

SEQ ID NO: 80516 - RNA, 21 nt, Artificial Sequence
  Chemically synthesized
ucaguaggcaaguuuuaccua

SEQ ID NO: 80517 - RNA, 21 nt, Artificial Sequence
  Chemically synthesized
aauacugucuuuguccuuuga

SEQ ID NO: 80518 - RNA, 21 nt, Artificial Sequence
  Chemically synthesized
auacugucuuuguccuuugau

SEQ ID NO: 80519 - RNA, 21 nt, Artificial Sequence
  Chemically synthesized
gcuaugaaaucacaaagacug

SEQ ID NO: 80520 - RNA, 21 nt, Artificial Sequence
  Chemically synthesized
accgucuucucaaagacgaag

SEQ ID NO: 80521 - RNA, 21 nt, Artificial Sequence
  Chemically synthesized
aaggucuuugcaaaguucagu

SEQ ID NO: 80522 - RNA, 21 nt, Artificial Sequence
  Chemically synthesized
aaguucagugcucgguguucu

SEQ ID NO: 80523 - RNA, 21 nt, Artificial Sequence
  Chemically synthesized
ucgguguucucggcacaacaa

SEQ ID NO: 80524 - RNA, 21 nt, Artificial Sequence
  Chemically synthesized
aagguauuuuggcaacucuua

SEQ ID NO: 80525 - RNA, 21 nt, Artificial Sequence
  Chemically synthesized
ucgucaaacacugucuugagg

SEQ ID NO: 80526 - RNA, 21 nt, Artificial Sequence
  Chemically synthesized
ccuucaguuucucgaucgugu

SEQ ID NO: 80527 - RNA, 21 nt, Artificial Sequence
  Chemically synthesized
accucaggauaccacuuugca

SEQ ID NO: 80528 - RNA, 21 nt, Artificial Sequence
  Chemically synthesized
caaaugaugcaggacucacaa

SEQ ID NO: 80529 - RNA, 21 nt, Artificial Sequence
  Chemically synthesized
acccaaagcugaggaaaacug

SEQ ID NO: 80530 - RNA, 21 nt, Artificial Sequence
  Chemically synthesized
guaucccauaagcccagauuc

SEQ ID NO: 80531 - RNA, 21 nt, Artificial Sequence
  Chemically synthesized
auaagcccagauucaccgguu

SEQ ID NO: 80532 - RNA, 21 nt, Artificial Sequence
  Chemically synthesized
uaccauaacauuggcagaaua

SEQ ID NO: 80533 - RNA, 21 nt, Artificial Sequence
  Chemically synthesized
ucagcacuagcacaguuuaca

SEQ ID NO: 80534 - RNA, 21 nt, Artificial Sequence
  Chemically synthesized
cacaguuuacagaaccucaca

SEQ ID NO: 80535 - RNA, 21 nt, Artificial Sequence
  Chemically synthesized
guuaugucgggaacacgugcu

SEQ ID NO: 80536 - RNA, 21 nt, Artificial Sequence
  Chemically synthesized
agguauuuuggcaacucuuaa

SEQ ID NO: 80537 - RNA, 21 nt, Artificial Sequence
  Chemically synthesized
aacaaaaaguuggcauugagu

SEQ ID NO: 80538 - RNA, 21 nt, Artificial Sequence
  Chemically synthesized
acaaagguuccaagggacagg

SEQ ID NO: 80539 - RNA, 21 nt, Artificial Sequence
  Chemically synthesized
aagcugaggaaaacugcagag

SEQ ID NO: 80540 - RNA, 21 nt, Artificial Sequence
  Chemically synthesized
gauauauucuccaggaaaugc

SEQ ID NO: 80541 - RNA, 21 nt, Artificial Sequence
  Chemically synthesized
auucuccaggaaaugcauugg

SEQ ID NO: 80542 - RNA, 21 nt, Artificial Sequence
  Chemically synthesized
auugguuguguaacugaucag

SEQ ID NO: 80543 - RNA, 21 nt, Artificial Sequence
  Chemically synthesized
aaacuauaaagcugcaacaca

SEQ ID NO: 80544 - RNA, 21 nt, Artificial Sequence
  Chemically synthesized
acaccuaguuacuagaaaacu

SEQ ID NO: 80545 - RNA, 21 nt, Artificial Sequence
  Chemically synthesized
aaggaaagcacuuauuagcuc

SEQ ID NO: 80546 - RNA, 21 nt, Artificial Sequence
  Chemically synthesized
aggaaagcacuuauuagcucu

SEQ ID NO: 80547 - RNA, 21 nt, Artificial Sequence
  Chemically synthesized
gguguaagagaaaggaaaagc

SEQ ID NO: 80548 - RNA, 21 nt, Artificial Sequence
  Chemically synthesized
ccuuuuagaguuuuuacccgu

SEQ ID NO: 80549 - RNA, 21 nt, Artificial Sequence
  Chemically synthesized
gaguuuuuacccgugacacuu

SEQ ID NO: 80550 - RNA, 21 nt, Artificial Sequence
  Chemically synthesized
cucgcuaugaaaucacaaaga

SEQ ID NO: 80551 - RNA, 21 nt, Artificial Sequence
  Chemically synthesized
cuacgcucacuccauuacagu

SEQ ID NO: 80552 - RNA, 21 nt, Artificial Sequence
  Chemically synthesized
cgcaucugagaacuacauagg

SEQ ID NO: 80553 - RNA, 21 nt, Artificial Sequence
  Chemically synthesized
uaacaaaaaguuggcauugag

SEQ ID NO: 80554 - RNA, 21 nt, Artificial Sequence
  Chemically synthesized
gcaggcauuuucucuuccucu

SEQ ID NO: 80555 - RNA, 21 nt, Artificial Sequence
  Chemically synthesized
cucgaucgugucuuuaucauc

SEQ ID NO: 80556 - RNA, 21 nt, Artificial Sequence
  Chemically synthesized
ugucgguaaucuggcaagaca

SEQ ID NO: 80557 - RNA, 21 nt, Artificial Sequence
  Chemically synthesized
ccuaguuacuagaaaacuaag

SEQ ID NO: 80558 - RNA, 21 nt, Artificial Sequence
  Chemically synthesized
acuaaggaaagcacuuauuag

SEQ ID NO: 80559 - RNA, 21 nt, Artificial Sequence
  Chemically synthesized
gacaaaaaaaccuucuaaugc

SEQ ID NO: 80560 - RNA, 21 nt, Artificial Sequence
  Chemically synthesized
guaguguaaaucuccacuucg

SEQ ID NO: 80561 - RNA, 21 nt, Artificial Sequence
  Chemically synthesized
ucugcaccuccuaacugcaga

SEQ ID NO: 80562 - RNA, 21 nt, Artificial Sequence
  Chemically synthesized
ugcaccuccuaacugcagaag

SEQ ID NO: 80563 - RNA, 21 nt, Artificial Sequence
  Chemically synthesized
aguguaguucagaagguauuu

SEQ ID NO: 80564 - RNA, 21 nt, Artificial Sequence
  Chemically synthesized
agaaugugagucugaacucuu

SEQ ID NO: 80565 - RNA, 21 nt, Artificial Sequence
  Chemically synthesized
agaucaaguuuaguucccacu

SEQ ID NO: 80566 - RNA, 21 nt, Artificial Sequence
  Chemically synthesized
ccacuuugcacggacauuuuc

SEQ ID NO: 80567 - RNA, 21 nt, Artificial Sequence
  Chemically synthesized
uguccagcuguaucccauaag

SEQ ID NO: 80568 - RNA, 21 nt, Artificial Sequence
  Chemically synthesized
cagauucaccgguuuuccauc

SEQ ID NO: 80569 - RNA, 21 nt, Artificial Sequence
  Chemically synthesized
auugucaaagacaguagggau

SEQ ID NO: 80570 - RNA, 21 nt, Artificial Sequence
  Chemically synthesized
guagggauauauucuccagga

SEQ ID NO: 80571 - RNA, 21 nt, Artificial Sequence
  Chemically synthesized
cuguauucucgccagugaguu

SEQ ID NO: 80572 - RNA, 21 nt, Artificial Sequence
  Chemically synthesized
cccaaaggaacaucaauaggc

SEQ ID NO: 80573 - RNA, 21 nt, Artificial Sequence
  Chemically synthesized
cuggcaagacagugauguuaa

SEQ ID NO: 80574 - RNA, 21 nt, Artificial Sequence
  Chemically synthesized
aagcacuuacuaaguuagcga

SEQ ID NO: 80575 - RNA, 21 nt, Artificial Sequence
  Chemically synthesized
cuaaguuagcgacuaacagaa

SEQ ID NO: 80576 - RNA, 21 nt, Artificial Sequence
  Chemically synthesized
aaguuagcgacuaacagaaca

SEQ ID NO: 80577 - RNA, 21 nt, Artificial Sequence
  Chemically synthesized
cauggcagguguaagagaaag

SEQ ID NO: 80578 - RNA, 21 nt, Artificial Sequence
  Chemically synthesized
ucuguucaaaaucuccgcaaa

SEQ ID NO: 80579 - RNA, 21 nt, Artificial Sequence
  Chemically synthesized
uaacucacuggugaguucaau

SEQ ID NO: 80580 - RNA, 21 nt, Artificial Sequence
  Chemically synthesized
cuacauaggagagcaaguguc

SEQ ID NO: 80581 - RNA, 21 nt, Artificial Sequence
  Chemically synthesized
ccgucuucucaaagacgaagg

SEQ ID NO: 80582 - RNA, 21 nt, Artificial Sequence
  Chemically synthesized
guucucggcacaacaaugcag

SEQ ID NO: 80583 - RNA, 21 nt, Artificial Sequence
  Chemically synthesized
augugagucugaacucuuaca

SEQ ID NO: 80584 - RNA, 21 nt, Artificial Sequence
  Chemically synthesized
aguuucucgaucgugucuuua

SEQ ID NO: 80585 - RNA, 21 nt, Artificial Sequence
  Chemically synthesized
agcuguaucccauaagcccag

SEQ ID NO: 80586 - RNA, 21 nt, Artificial Sequence
  Chemically synthesized
agugaguuaaguuguacagaa

SEQ ID NO: 80587 - RNA, 21 nt, Artificial Sequence
  Chemically synthesized
gagggucaguauuggucaagu

SEQ ID NO: 80588 - RNA, 21 nt, Artificial Sequence
  Chemically synthesized
acccgugacacuuucauuccu

SEQ ID NO: 80589 - RNA, 21 nt, Artificial Sequence
  Chemically synthesized
cugucuuuguccuuugaucac

SEQ ID NO: 80590 - RNA, 21 nt, Artificial Sequence
  Chemically synthesized
cagaaaacucgcuaugaaauc

SEQ ID NO: 80591 - RNA, 21 nt, Artificial Sequence
  Chemically synthesized
ucacaaagacugauccaaaga

SEQ ID NO: 80592 - RNA, 21 nt, Artificial Sequence
  Chemically synthesized
guacaauguuaugucgggaac

SEQ ID NO: 80593 - RNA, 21 nt, Artificial Sequence
  Chemically synthesized
gugaguucaauggcaacgcuu

SEQ ID NO: 80594 - RNA, 21 nt, Artificial Sequence
  Chemically synthesized
auucgggaggcuguucugcuu

SEQ ID NO: 80595 - RNA, 21 nt, Artificial Sequence
  Chemically synthesized
aaaguucagugcucgguguuc

SEQ ID NO: 80596 - RNA, 21 nt, Artificial Sequence
  Chemically synthesized
ugcaguguaguucagaaggua

SEQ ID NO: 80597 - RNA, 21 nt, Artificial Sequence
  Chemically synthesized
acauuuacaacagcaggcauu

SEQ ID NO: 80598 - RNA, 21 nt, Artificial Sequence
  Chemically synthesized
aggaugaugggaguguuggga

SEQ ID NO: 80599 - RNA, 21 nt, Artificial Sequence
  Chemically synthesized
aggauaccacuuugcacggac

SEQ ID NO: 80600 - RNA, 21 nt, Artificial Sequence
  Chemically synthesized
ugaguuaaguuguacagaaca

SEQ ID NO: 80601 - RNA, 21 nt, Artificial Sequence
  Chemically synthesized
aguuaaguuguacagaacauc

SEQ ID NO: 80602 - RNA, 21 nt, Artificial Sequence
  Chemically synthesized
agacccaaaggaacaucaaua

SEQ ID NO: 80603 - RNA, 21 nt, Artificial Sequence
  Chemically synthesized
aagagggucaguauuggucaa

SEQ ID NO: 80604 - RNA, 21 nt, Artificial Sequence
  Chemically synthesized
ucuggcaagacagugauguua

SEQ ID NO: 80605 - RNA, 21 nt, Artificial Sequence
  Chemically synthesized
agaguuuuuacccgugacacu

SEQ ID NO: 80606 - RNA, 21 nt, Artificial Sequence
  Chemically synthesized
cuggugaguucaauggcaacg

SEQ ID NO: 80607 - RNA, 21 nt, Artificial Sequence
  Chemically synthesized
cugagaacuacauaggagagc

SEQ ID NO: 80608 - RNA, 21 nt, Artificial Sequence
  Chemically synthesized
cugaacucuuacauuuagaac

SEQ ID NO: 80609 - RNA, 21 nt, Artificial Sequence
  Chemically synthesized
agcaggcauuuucucuuccuc

SEQ ID NO: 80610 - RNA, 21 nt, Artificial Sequence
  Chemically synthesized
gugucuuuaucaucccuaaga

SEQ ID NO: 80611 - RNA, 21 nt, Artificial Sequence
  Chemically synthesized
uguauucucgccagugaguua

SEQ ID NO: 80612 - RNA, 21 nt, Artificial Sequence
  Chemically synthesized
cgagguaaagagggucaguau

SEQ ID NO: 80613 - RNA, 21 nt, Artificial Sequence
  Chemically synthesized
ggcaaguuuuaccuacagcuc

SEQ ID NO: 80614 - RNA, 21 nt, Artificial Sequence
  Chemically synthesized
guaaaucuccacuucguauuu

SEQ ID NO: 80615 - RNA, 21 nt, Artificial Sequence
  Chemically synthesized
cuggucagaaaacucgcuaug

SEQ ID NO: 80616 - RNA, 21 nt, Artificial Sequence
  Chemically synthesized
gcagagaaacaggaaauggcc

SEQ ID NO: 80617 - RNA, 21 nt, Artificial Sequence
  Chemically synthesized
gggcgcuuuugaaaaauaagg

SEQ ID NO: 80618 - RNA, 21 nt, Artificial Sequence
  Chemically synthesized
gagcacuccagguauuuuaca

SEQ ID NO: 80619 - RNA, 21 nt, Artificial Sequence
  Chemically synthesized
acuaggaugaugggaguguug

SEQ ID NO: 80620 - RNA, 21 nt, Artificial Sequence
  Chemically synthesized
caccucaggauaccacuuugc

SEQ ID NO: 80621 - RNA, 21 nt, Artificial Sequence
  Chemically synthesized
ugcaggacucacaagggaaaa

SEQ ID NO: 80622 - RNA, 21 nt, Artificial Sequence
  Chemically synthesized
uugucaaagacaguagggaua

SEQ ID NO: 80623 - RNA, 21 nt, Artificial Sequence
  Chemically synthesized
ugucaaagacaguagggauau

SEQ ID NO: 80624 - RNA, 21 nt, Artificial Sequence
  Chemically synthesized
augcauugguuguguaacuga

SEQ ID NO: 80625 - RNA, 21 nt, Artificial Sequence
  Chemically synthesized
gcgagguaaagagggucagua

SEQ ID NO: 80626 - RNA, 21 nt, Artificial Sequence
  Chemically synthesized
gagguaaagagggucaguauu

SEQ ID NO: 80627 - RNA, 21 nt, Artificial Sequence
  Chemically synthesized
guaacauggaaagcacuuuua

SEQ ID NO: 80628 - RNA, 21 nt, Artificial Sequence
  Chemically synthesized
accuucuaaugcauuaucaga

SEQ ID NO: 80629 - RNA, 21 nt, Artificial Sequence
  Chemically synthesized
agcuggucagaaaacucgcua

SEQ ID NO: 80630 - RNA, 21 nt, Artificial Sequence
  Chemically synthesized
cuccauuacaguacaauguua

SEQ ID NO: 80631 - RNA, 21 nt, Artificial Sequence
  Chemically synthesized
ccuaacugcagaagcuaccgu

SEQ ID NO: 80632 - RNA, 21 nt, Artificial Sequence
  Chemically synthesized
aacugcagaagcuaccgucuu

SEQ ID NO: 80633 - RNA, 21 nt, Artificial Sequence
  Chemically synthesized
cagagaaacaggaaauggccg

SEQ ID NO: 80634 - RNA, 21 nt, Artificial Sequence
  Chemically synthesized
cucggaucgcuucgucaaaca

SEQ ID NO: 80635 - RNA, 21 nt, Artificial Sequence
  Chemically synthesized
ucggaucgcuucgucaaacac

SEQ ID NO: 80636 - RNA, 21 nt, Artificial Sequence
  Chemically synthesized
gaucaaguuuaguucccacua

SEQ ID NO: 80637 - RNA, 21 nt, Artificial Sequence
  Chemically synthesized
gcaccucaggauaccacuuug

SEQ ID NO: 80638 - RNA, 21 nt, Artificial Sequence
  Chemically synthesized
agacaguagggauauauucuc

SEQ ID NO: 80639 - RNA, 21 nt, Artificial Sequence
  Chemically synthesized
cuccaggaaaugcauugguug

SEQ ID NO: 80640 - RNA, 21 nt, Artificial Sequence
  Chemically synthesized
ugcauugguuguguaacugau

SEQ ID NO: 80641 - RNA, 21 nt, Artificial Sequence
  Chemically synthesized
gcugcaacacaugauuuuuac

SEQ ID NO: 80642 - RNA, 21 nt, Artificial Sequence
  Chemically synthesized
ucaucuacugcauuugacaga

SEQ ID NO: 80643 - RNA, 21 nt, Artificial Sequence
  Chemically synthesized
aaucuccacuucguauuuugu

SEQ ID NO: 80644 - RNA, 21 nt, Artificial Sequence
  Chemically synthesized
agaaaacucgcuaugaaauca

SEQ ID NO: 80645 - RNA, 21 nt, Artificial Sequence
  Chemically synthesized
caucugagaacuacauaggag

SEQ ID NO: 80646 - RNA, 21 nt, Artificial Sequence
  Chemically synthesized
ccuccuaacugcagaagcuac

SEQ ID NO: 80647 - RNA, 21 nt, Artificial Sequence
  Chemically synthesized
acugcagaagcuaccgucuuc

SEQ ID NO: 80648 - RNA, 21 nt, Artificial Sequence
  Chemically synthesized
aguuggcauugagugcgaagg

SEQ ID NO: 80649 - RNA, 21 nt, Artificial Sequence
  Chemically synthesized
auaggugaugggagucagcuu

SEQ ID NO: 80650 - RNA, 21 nt, Artificial Sequence
  Chemically synthesized
ugaugggaguguugggacagu

SEQ ID NO: 80651 - RNA, 21 nt, Artificial Sequence
  Chemically synthesized
ccgguuuuccaucuaccauaa

SEQ ID NO: 80652 - RNA, 21 nt, Artificial Sequence
  Chemically synthesized
acacuccacaauucugcaacu

SEQ ID NO: 80653 - RNA, 21 nt, Artificial Sequence
  Chemically synthesized
cauggaaagcacuuuuacuaa

SEQ ID NO: 80654 - RNA, 21 nt, Artificial Sequence
  Chemically synthesized
gaucaguaggcaaguuuuacc

SEQ ID NO: 80655 - RNA, 21 nt, Artificial Sequence
  Chemically synthesized
cugcuaacucacuggugaguu

SEQ ID NO: 80656 - RNA, 21 nt, Artificial Sequence
  Chemically synthesized
ggcauuuucucuuccucuucu

SEQ ID NO: 80657 - RNA, 21 nt, Artificial Sequence
  Chemically synthesized
cccaaagcugaggaaaacugc

SEQ ID NO: 80658 - RNA, 21 nt, Artificial Sequence
  Chemically synthesized
acauuggcagaauaauuguca

SEQ ID NO: 80659 - RNA, 21 nt, Artificial Sequence
  Chemically synthesized
uccaggaaaugcauugguugu

SEQ ID NO: 80660 - RNA, 21 nt, Artificial Sequence
  Chemically synthesized
caguuuacagaaccucacaga

SEQ ID NO: 80661 - RNA, 21 nt, Artificial Sequence
  Chemically synthesized
acagaaccucacagacccaaa

SEQ ID NO: 80662 - RNA, 21 nt, Artificial Sequence
  Chemically synthesized
gucgguaaucuggcaagacag

SEQ ID NO: 80663 - RNA, 21 nt, Artificial Sequence
  Chemically synthesized
aaagcacuuacuaaguuagcg

SEQ ID NO: 80664 - RNA, 21 nt, Artificial Sequence
  Chemically synthesized
aaauggccgcuccacucacau

SEQ ID NO: 80665 - RNA, 21 nt, Artificial Sequence
  Chemically synthesized
acuaacagaacaaccaguuua

SEQ ID NO: 80666 - RNA, 21 nt, Artificial Sequence
  Chemically synthesized
caauguaguguaaaucuccac

SEQ ID NO: 80667 - RNA, 21 nt, Artificial Sequence
  Chemically synthesized
cuguucugcuuuacgcaucug

SEQ ID NO: 80668 - RNA, 21 nt, Artificial Sequence
  Chemically synthesized
cugcagaagcuaccgucuucu

SEQ ID NO: 80669 - RNA, 21 nt, Artificial Sequence
  Chemically synthesized
uucucaaagacgaaggucuuu

SEQ ID NO: 80670 - RNA, 21 nt, Artificial Sequence
  Chemically synthesized
ucagaagguauuuuggcaacu

SEQ ID NO: 80671 - RNA, 21 nt, Artificial Sequence
  Chemically synthesized
aaggcuuuaagaaggcuuguc

SEQ ID NO: 80672 - RNA, 21 nt, Artificial Sequence
  Chemically synthesized
cgucaaacacugucuugaggc

SEQ ID NO: 80673 - RNA, 21 nt, Artificial Sequence
  Chemically synthesized
gcaccaaucuccuuagccaug

SEQ ID NO: 80674 - RNA, 21 nt, Artificial Sequence
  Chemically synthesized
gacauuuucaaaugaugcagg

SEQ ID NO: 80675 - RNA, 21 nt, Artificial Sequence
  Chemically synthesized
aaagcugaggaaaacugcaga

SEQ ID NO: 80676 - RNA, 21 nt, Artificial Sequence
  Chemically synthesized
guccagcuguaucccauaagc

SEQ ID NO: 80677 - RNA, 21 nt, Artificial Sequence
  Chemically synthesized
cagcuguaucccauaagccca

SEQ ID NO: 80678 - RNA, 21 nt, Artificial Sequence
  Chemically synthesized
ucgccagugaguuaaguugua

SEQ ID NO: 80679 - RNA, 21 nt, Artificial Sequence
  Chemically synthesized
ccagugaguuaaguuguacag

SEQ ID NO: 80680 - RNA, 21 nt, Artificial Sequence
  Chemically synthesized
gugaguuaaguuguacagaac

SEQ ID NO: 80681 - RNA, 21 nt, Artificial Sequence
  Chemically synthesized
cauugguuguguaacugauca

SEQ ID NO: 80682 - RNA, 21 nt, Artificial Sequence
  Chemically synthesized
ucgguaaucuggcaagacagu

SEQ ID NO: 80683 - RNA, 21 nt, Artificial Sequence
  Chemically synthesized
cgguaaucuggcaagacagug

SEQ ID NO: 80684 - RNA, 21 nt, Artificial Sequence
  Chemically synthesized
guaaucuggcaagacagugau

SEQ ID NO: 80685 - RNA, 21 nt, Artificial Sequence
  Chemically synthesized
aaccuucuaaugcauuaucag

SEQ ID NO: 80686 - RNA, 21 nt, Artificial Sequence
  Chemically synthesized
agcacuuacuaaguuagcgac

SEQ ID NO: 80687 - RNA, 21 nt, Artificial Sequence
  Chemically synthesized
cuccacuucguauuuugucaa

SEQ ID NO: 80688 - RNA, 21 nt, Artificial Sequence
  Chemically synthesized
aguucaauggcaacgcuucau

SEQ ID NO: 80689 - RNA, 21 nt, Artificial Sequence
  Chemically synthesized
gggcugagacauuuacaacag

SEQ ID NO: 80690 - RNA, 21 nt, Artificial Sequence
  Chemically synthesized
caggcauuuucucuuccucuu

SEQ ID NO: 80691 - RNA, 21 nt, Artificial Sequence
  Chemically synthesized
uagacccugcggauaggugau

SEQ ID NO: 80692 - RNA, 21 nt, Artificial Sequence
  Chemically synthesized
gucagcuucuucuccuucagu

SEQ ID NO: 80693 - RNA, 21 nt, Artificial Sequence
  Chemically synthesized
acacacuugauggccugcauc

SEQ ID NO: 80694 - RNA, 21 nt, Artificial Sequence
  Chemically synthesized
gucagcacuagcacaguuuac

SEQ ID NO: 80695 - RNA, 21 nt, Artificial Sequence
  Chemically synthesized
ucaagugacagugucgguaau

SEQ ID NO: 80696 - RNA, 21 nt, Artificial Sequence
  Chemically synthesized
agugucgguaaucuggcaaga

SEQ ID NO: 80697 - RNA, 21 nt, Artificial Sequence
  Chemically synthesized
cucugaauaaaguaacaugga

SEQ ID NO: 80698 - RNA, 21 nt, Artificial Sequence
  Chemically synthesized
cgacaaaaaaaccuucuaaug

SEQ ID NO: 80699 - RNA, 21 nt, Artificial Sequence
  Chemically synthesized
uaacugaucaguaggcaaguu

SEQ ID NO: 80700 - RNA, 21 nt, Artificial Sequence
  Chemically synthesized
gcuacgcucacuccauuacag

SEQ ID NO: 80701 - RNA, 21 nt, Artificial Sequence
  Chemically synthesized
aguucagugcucgguguucuc

SEQ ID NO: 80702 - RNA, 21 nt, Artificial Sequence
  Chemically synthesized
ccucaggauaccacuuugcac

SEQ ID NO: 80703 - RNA, 21 nt, Artificial Sequence
  Chemically synthesized
ugaugcaggacucacaaggga

SEQ ID NO: 80704 - RNA, 21 nt, Artificial Sequence
  Chemically synthesized
gggaaaagcaaauuaagaaca

SEQ ID NO: 80705 - RNA, 21 nt, Artificial Sequence
  Chemically synthesized
aaacacuccacaauucugcaa

SEQ ID NO: 80706 - RNA, 21 nt, Artificial Sequence
  Chemically synthesized
guacagaacaucgucagcacu

SEQ ID NO: 80707 - RNA, 21 nt, Artificial Sequence
  Chemically synthesized
caggaaaugcauugguugugu

SEQ ID NO: 80708 - RNA, 21 nt, Artificial Sequence
  Chemically synthesized
uggcaagacagugauguuaag

SEQ ID NO: 80709 - RNA, 21 nt, Artificial Sequence
  Chemically synthesized
gcauauugcucagucagaagg

SEQ ID NO: 80710 - RNA, 21 nt, Artificial Sequence
  Chemically synthesized
cuuacuaaguuagcgacuaac

SEQ ID NO: 80711 - RNA, 21 nt, Artificial Sequence
  Chemically synthesized
cgacuaacagaacaaccaguu

SEQ ID NO: 80712 - RNA, 21 nt, Artificial Sequence
  Chemically synthesized
caucaucuacugcauuugaca

SEQ ID NO: 80713 - RNA, 21 nt, Artificial Sequence
  Chemically synthesized
cugcauuugacagaaauuaac

SEQ ID NO: 80714 - RNA, 21 nt, Artificial Sequence
  Chemically synthesized
agcugcuacgcucacuccauu

SEQ ID NO: 80715 - RNA, 21 nt, Artificial Sequence
  Chemically synthesized
ugcuaacucacuggugaguuc

SEQ ID NO: 80716 - RNA, 21 nt, Artificial Sequence
  Chemically synthesized
ucggcacaacaaugcagugua

SEQ ID NO: 80717 - RNA, 21 nt, Artificial Sequence
  Chemically synthesized
guguaguucagaagguauuuu

SEQ ID NO: 80718 - RNA, 21 nt, Artificial Sequence
  Chemically synthesized
gaagguauuuuggcaacucuu

SEQ ID NO: 80719 - RNA, 21 nt, Artificial Sequence
  Chemically synthesized
uggcaacucuuaaucugaaca

SEQ ID NO: 80720 - RNA, 21 nt, Artificial Sequence
  Chemically synthesized
agcaccaaucuccuuagccau

SEQ ID NO: 80721 - RNA, 21 nt, Artificial Sequence
  Chemically synthesized
aaguuuaguucccacuaggau

SEQ ID NO: 80722 - RNA, 21 nt, Artificial Sequence
  Chemically synthesized
guuuaguucccacuaggauga

SEQ ID NO: 80723 - RNA, 21 nt, Artificial Sequence
  Chemically synthesized
cguaaucugucauaaucuucu

SEQ ID NO: 80724 - RNA, 21 nt, Artificial Sequence
  Chemically synthesized
ccagauucaccgguuuuccau

SEQ ID NO: 80725 - RNA, 21 nt, Artificial Sequence
  Chemically synthesized
aacauuggcagaauaauuguc

SEQ ID NO: 80726 - RNA, 21 nt, Artificial Sequence
  Chemically synthesized
aggaaaacugcagagaaacag

SEQ ID NO: 80727 - RNA, 21 nt, Artificial Sequence
  Chemically synthesized
caguagggauauauucuccag

SEQ ID NO: 80728 - RNA, 21 nt, Artificial Sequence
  Chemically synthesized
acagaacaucgucagcacuag

SEQ ID NO: 80729 - RNA, 21 nt, Artificial Sequence
  Chemically synthesized
agcacuuauuagcucugaaua

SEQ ID NO: 80730 - RNA, 21 nt, Artificial Sequence
  Chemically synthesized
acugaucaguaggcaaguuuu

SEQ ID NO: 80731 - RNA, 21 nt, Artificial Sequence
  Chemically synthesized
guaagagaaaggaaaagcuua

SEQ ID NO: 80732 - RNA, 21 nt, Artificial Sequence
  Chemically synthesized
ccugauaauaccaaccuuucu

SEQ ID NO: 80733 - RNA, 21 nt, Artificial Sequence
  Chemically synthesized
gacacuuucauuccuuguaca

SEQ ID NO: 80734 - RNA, 21 nt, Artificial Sequence
  Chemically synthesized
aggcaaguuuuaccuacagcu

SEQ ID NO: 80735 - RNA, 21 nt, Artificial Sequence
  Chemically synthesized
cugcagagaaacaggaaaugg

SEQ ID NO: 80736 - RNA, 21 nt, Artificial Sequence
  Chemically synthesized
ugcugcuaacucacuggugag

SEQ ID NO: 80737 - RNA, 21 nt, Artificial Sequence
  Chemically synthesized
gcuaacucacuggugaguuca

SEQ ID NO: 80738 - RNA, 21 nt, Artificial Sequence
  Chemically synthesized
cuaccgucuucucaaagacga

SEQ ID NO: 80739 - RNA, 21 nt, Artificial Sequence
  Chemically synthesized
gguauuuuacagcaccaaucu

SEQ ID NO: 80740 - RNA, 21 nt, Artificial Sequence
  Chemically synthesized
gucuuuaucaucccuaagauc

SEQ ID NO: 80741 - RNA, 21 nt, Artificial Sequence
  Chemically synthesized
cauaagcccagauucaccggu

SEQ ID NO: 80742 - RNA, 21 nt, Artificial Sequence
  Chemically synthesized
ucuaccauaacauuggcagaa

SEQ ID NO: 80743 - RNA, 21 nt, Artificial Sequence
  Chemically synthesized
uggcagaauaauugucaaaga

SEQ ID NO: 80744 - RNA, 21 nt, Artificial Sequence
  Chemically synthesized
acaguagggauauauucucca

SEQ ID NO: 80745 - RNA, 21 nt, Artificial Sequence
  Chemically synthesized
agaacaucgucagcacuagca

SEQ ID NO: 80746 - RNA, 21 nt, Artificial Sequence
  Chemically synthesized
gcacaguuuacagaaccucac

SEQ ID NO: 80747 - RNA, 23 nt, Artificial Sequence
  Chemically synthesized
gacaguauuuugacaaaauacga

SEQ ID NO: 80748 - RNA, 23 nt, Artificial Sequence
  Chemically synthesized
caguauuuugacaaaauacgaag

SEQ ID NO: 80749 - RNA, 23 nt, Artificial Sequence
  Chemically synthesized
gcauguaugacuuaauaaauccu

SEQ ID NO: 80750 - RNA, 23 nt, Artificial Sequence
  Chemically synthesized
ccauaaaaccauuuuuugaacca

SEQ ID NO: 80751 - RNA, 23 nt, Artificial Sequence
  Chemically synthesized
guuaauuucugucaaaugcagua

SEQ ID NO: 80752 - RNA, 23 nt, Artificial Sequence
  Chemically synthesized
agaauacagcgugggacccuuca

SEQ ID NO: 80753 - RNA, 23 nt, Artificial Sequence
  Chemically synthesized
gcaauuagcauuauguuuugcau

SEQ ID NO: 80754 - RNA, 23 nt, Artificial Sequence
  Chemically synthesized
gcuuuucccuugugaguccugca

SEQ ID NO: 80755 - RNA, 23 nt, Artificial Sequence
  Chemically synthesized
cucuaaaagguuaauuucuguca

SEQ ID NO: 80756 - RNA, 23 nt, Artificial Sequence
  Chemically synthesized
uguucuuaauuugcuuuucccuu

SEQ ID NO: 80757 - RNA, 23 nt, Artificial Sequence
  Chemically synthesized
cauuauguuuugcauguaugacu

SEQ ID NO: 80758 - RNA, 23 nt, Artificial Sequence
  Chemically synthesized
uaguuuucuaguaacuaggugua

SEQ ID NO: 80759 - RNA, 23 nt, Artificial Sequence
  Chemically synthesized
caaauugggcauuuaauucaucu

SEQ ID NO: 80760 - RNA, 23 nt, Artificial Sequence
  Chemically synthesized
guaaagcagaacagccucccgaa

SEQ ID NO: 80761 - RNA, 23 nt, Artificial Sequence
  Chemically synthesized
guaaacugugcuagugcugacga

SEQ ID NO: 80762 - RNA, 23 nt, Artificial Sequence
  Chemically synthesized
agacaguauuuugacaaaauacg

SEQ ID NO: 80763 - RNA, 23 nt, Artificial Sequence
  Chemically synthesized
aguuuucuaguaacuagguguaa

SEQ ID NO: 80764 - RNA, 23 nt, Artificial Sequence
  Chemically synthesized
gucuuugacaauuauucugccaa

SEQ ID NO: 80765 - RNA, 23 nt, Artificial Sequence
  Chemically synthesized
uguaaaauaccuggagugcucgg

SEQ ID NO: 80766 - RNA, 23 nt, Artificial Sequence
  Chemically synthesized
aauggagugagcguagcagcuca

SEQ ID NO: 80767 - RNA, 23 nt, Artificial Sequence
  Chemically synthesized
ucuguaaacugugcuagugcuga

SEQ ID NO: 80768 - RNA, 23 nt, Artificial Sequence
  Chemically synthesized
cuacacugcauuguugugccgag

SEQ ID NO: 80769 - RNA, 23 nt, Artificial Sequence
  Chemically synthesized
guuaugguagauggaaaaccggu

SEQ ID NO: 80770 - RNA, 23 nt, Artificial Sequence
  Chemically synthesized
uaaaaaucauguguugcagcuuu

SEQ ID NO: 80771 - RNA, 23 nt, Artificial Sequence
  Chemically synthesized
cuguaaacugugcuagugcugac

SEQ ID NO: 80772 - RNA, 23 nt, Artificial Sequence
  Chemically synthesized
uccuguuucucugcaguuuuccu

SEQ ID NO: 80773 - RNA, 23 nt, Artificial Sequence
  Chemically synthesized
ccauuuccuguuucucugcaguu

SEQ ID NO: 80774 - RNA, 23 nt, Artificial Sequence
  Chemically synthesized
gaauucuguuuagcugugggugu

SEQ ID NO: 80775 - RNA, 23 nt, Artificial Sequence
  Chemically synthesized
acacaaccaaugcauuuccugga

SEQ ID NO: 80776 - RNA, 23 nt, Artificial Sequence
  Chemically synthesized
ugcaauuagcauuauguuuugca

SEQ ID NO: 80777 - RNA, 23 nt, Artificial Sequence
  Chemically synthesized
cuuucugauaaugcauuagaagg

SEQ ID NO: 80778 - RNA, 23 nt, Artificial Sequence
  Chemically synthesized
uaauuucugucaaaugcaguaga

SEQ ID NO: 80779 - RNA, 23 nt, Artificial Sequence
  Chemically synthesized
ccugcaucauuugaaaauguccg

SEQ ID NO: 80780 - RNA, 23 nt, Artificial Sequence
  Chemically synthesized
gaagaagcugacucccaucaccu

SEQ ID NO: 80781 - RNA, 23 nt, Artificial Sequence
  Chemically synthesized
aucaagugugugguggugggaga

SEQ ID NO: 80782 - RNA, 23 nt, Artificial Sequence
  Chemically synthesized
aaauuuagcccuaaaaugacaag

SEQ ID NO: 80783 - RNA, 23 nt, Artificial Sequence
  Chemically synthesized
cuguuucucugcaguuuuccuca

SEQ ID NO: 80784 - RNA, 23 nt, Artificial Sequence
  Chemically synthesized
guauuuugacaaaauacgaagug

SEQ ID NO: 80785 - RNA, 23 nt, Artificial Sequence
  Chemically synthesized
guucuguaaacugugcuagugcu

SEQ ID NO: 80786 - RNA, 23 nt, Artificial Sequence
  Chemically synthesized
aacucaccagugaguuagcagca

SEQ ID NO: 80787 - RNA, 23 nt, Artificial Sequence
  Chemically synthesized
acuacacugcauuguugugccga

SEQ ID NO: 80788 - RNA, 23 nt, Artificial Sequence
  Chemically synthesized
uuagcagcacguguucccgacau

SEQ ID NO: 80789 - RNA, 23 nt, Artificial Sequence
  Chemically synthesized
guguucuuaauuugcuuuucccu

SEQ ID NO: 80790 - RNA, 23 nt, Artificial Sequence
  Chemically synthesized
auauaucccuacugucuuugaca

SEQ ID NO: 80791 - RNA, 23 nt, Artificial Sequence
  Chemically synthesized
caauuagcauuauguuuugcaug

SEQ ID NO: 80792 - RNA, 23 nt, Artificial Sequence
  Chemically synthesized
caucuuuaaacugguuguucugu

SEQ ID NO: 80793 - RNA, 23 nt, Artificial Sequence
  Chemically synthesized
guuuucugaccagcuuuugcgga

SEQ ID NO: 80794 - RNA, 23 nt, Artificial Sequence
  Chemically synthesized
gauuucauagcgaguuuucugac

SEQ ID NO: 80795 - RNA, 23 nt, Artificial Sequence
  Chemically synthesized
guuuguucuaaauguaagaguuc

SEQ ID NO: 80796 - RNA, 23 nt, Artificial Sequence
  Chemically synthesized
cugcaucauuugaaaauguccgu

SEQ ID NO: 80797 - RNA, 23 nt, Artificial Sequence
  Chemically synthesized
cuuguucagauuaagaguugcca

SEQ ID NO: 80798 - RNA, 23 nt, Artificial Sequence
  Chemically synthesized
uucucugcaguuuuccucagcuu

SEQ ID NO: 80799 - RNA, 23 nt, Artificial Sequence
  Chemically synthesized
caguuuuccucagcuuugggugg

SEQ ID NO: 80800 - RNA, 23 nt, Artificial Sequence
  Chemically synthesized
cugucuugccagauuaccgacac

SEQ ID NO: 80801 - RNA, 23 nt, Artificial Sequence
  Chemically synthesized
acuuuauucagagcuaauaagug

SEQ ID NO: 80802 - RNA, 23 nt, Artificial Sequence
  Chemically synthesized
cuguaaaauaccuggagugcucg

SEQ ID NO: 80803 - RNA, 23 nt, Artificial Sequence
  Chemically synthesized
guucuuaauuugcuuuucccuug

SEQ ID NO: 80804 - RNA, 23 nt, Artificial Sequence
  Chemically synthesized
aauuauucugccaauguuauggu

SEQ ID NO: 80805 - RNA, 23 nt, Artificial Sequence
  Chemically synthesized
ugucuugccagauuaccgacacu

SEQ ID NO: 80806 - RNA, 23 nt, Artificial Sequence
  Chemically synthesized
cuucugcaguuaggaggugcaga

SEQ ID NO: 80807 - RNA, 23 nt, Artificial Sequence
  Chemically synthesized
cuuugagaagacgguagcuucug

SEQ ID NO: 80808 - RNA, 23 nt, Artificial Sequence
  Chemically synthesized
ucuuaacaucacugucuugccag

SEQ ID NO: 80809 - RNA, 23 nt, Artificial Sequence
  Chemically synthesized
cuuaguuuucuaguaacuaggug

SEQ ID NO: 80810 - RNA, 23 nt, Artificial Sequence
  Chemically synthesized
auuauucugccaauguuauggua

SEQ ID NO: 80811 - RNA, 23 nt, Artificial Sequence
  Chemically synthesized
ugucuuugacaauuauucugcca

SEQ ID NO: 80812 - RNA, 23 nt, Artificial Sequence
  Chemically synthesized
acugucuugccagauuaccgaca

SEQ ID NO: 80813 - RNA, 23 nt, Artificial Sequence
  Chemically synthesized
aucuuuaaacugguuguucuguu

SEQ ID NO: 80814 - RNA, 23 nt, Artificial Sequence
  Chemically synthesized
aacagccucccgaaugaagcguu

SEQ ID NO: 80815 - RNA, 23 nt, Artificial Sequence
  Chemically synthesized
ucuuucugauaaugcauuagaag

SEQ ID NO: 80816 - RNA, 23 nt, Artificial Sequence
  Chemically synthesized
gaaauguuuucuuaagcuuuucc

SEQ ID NO: 80817 - RNA, 23 nt, Artificial Sequence
  Chemically synthesized
acucuaaaagguuaauuucuguc

SEQ ID NO: 80818 - RNA, 23 nt, Artificial Sequence
  Chemically synthesized
uuuucugaccagcuuuugcggag

SEQ ID NO: 80819 - RNA, 23 nt, Artificial Sequence
  Chemically synthesized
uauucagagcuaauaagugcuuu

SEQ ID NO: 80820 - RNA, 23 nt, Artificial Sequence
  Chemically synthesized
gcuguagguaaaacuugccuacu

SEQ ID NO: 80821 - RNA, 23 nt, Artificial Sequence
  Chemically synthesized
ucguauuuugucaaaauacuguc

SEQ ID NO: 80822 - RNA, 23 nt, Artificial Sequence
  Chemically synthesized
cuucguauuuugucaaaauacug

SEQ ID NO: 80823 - RNA, 23 nt, Artificial Sequence
  Chemically synthesized
aggauuuauuaagucauacaugc

SEQ ID NO: 80824 - RNA, 23 nt, Artificial Sequence
  Chemically synthesized
ugguucaaaaaaugguuuuaugg

SEQ ID NO: 80825 - RNA, 23 nt, Artificial Sequence
  Chemically synthesized
uacugcauuugacagaaauuaac

SEQ ID NO: 80826 - RNA, 23 nt, Artificial Sequence
  Chemically synthesized
ugaagggucccacgcuguauucu

SEQ ID NO: 80827 - RNA, 23 nt, Artificial Sequence
  Chemically synthesized
augcaaaacauaaugcuaauugc

SEQ ID NO: 80828 - RNA, 23 nt, Artificial Sequence
  Chemically synthesized
ugcaggacucacaagggaaaagc

SEQ ID NO: 80829 - RNA, 23 nt, Artificial Sequence
  Chemically synthesized
ugacagaaauuaaccuuuuagag

SEQ ID NO: 80830 - RNA, 23 nt, Artificial Sequence
  Chemically synthesized
aagggaaaagcaaauuaagaaca

SEQ ID NO: 80831 - RNA, 23 nt, Artificial Sequence
  Chemically synthesized
agucauacaugcaaaacauaaug

SEQ ID NO: 80832 - RNA, 23 nt, Artificial Sequence
  Chemically synthesized
uacaccuaguuacuagaaaacua

SEQ ID NO: 80833 - RNA, 23 nt, Artificial Sequence
  Chemically synthesized
agaugaauuaaaugcccaauuug

SEQ ID NO: 80834 - RNA, 23 nt, Artificial Sequence
  Chemically synthesized
uucgggaggcuguucugcuuuac

SEQ ID NO: 80835 - RNA, 23 nt, Artificial Sequence
  Chemically synthesized
ucgucagcacuagcacaguuuac

SEQ ID NO: 80836 - RNA, 23 nt, Artificial Sequence
  Chemically synthesized
cguauuuugucaaaauacugucu

SEQ ID NO: 80837 - RNA, 23 nt, Artificial Sequence
  Chemically synthesized
uuacaccuaguuacuagaaaacu

SEQ ID NO: 80838 - RNA, 23 nt, Artificial Sequence
  Chemically synthesized
uuggcagaauaauugucaaagac

SEQ ID NO: 80839 - RNA, 23 nt, Artificial Sequence
  Chemically synthesized
ccgagcacuccagguauuuuaca

SEQ ID NO: 80840 - RNA, 23 nt, Artificial Sequence
  Chemically synthesized
ugagcugcuacgcucacuccauu

SEQ ID NO: 80841 - RNA, 23 nt, Artificial Sequence
  Chemically synthesized
ucagcacuagcacaguuuacaga

SEQ ID NO: 80842 - RNA, 23 nt, Artificial Sequence
  Chemically synthesized
cucggcacaacaaugcaguguag

SEQ ID NO: 80843 - RNA, 23 nt, Artificial Sequence
  Chemically synthesized
accgguuuuccaucuaccauaac

SEQ ID NO: 80844 - RNA, 23 nt, Artificial Sequence
  Chemically synthesized
aaagcugcaacacaugauuuuua

SEQ ID NO: 80845 - RNA, 23 nt, Artificial Sequence
  Chemically synthesized
gucagcacuagcacaguuuacag

SEQ ID NO: 80846 - RNA, 23 nt, Artificial Sequence
  Chemically synthesized
aggaaaacugcagagaaacagga

SEQ ID NO: 80847 - RNA, 23 nt, Artificial Sequence
  Chemically synthesized
aacugcagagaaacaggaaaugg

SEQ ID NO: 80848 - RNA, 23 nt, Artificial Sequence
  Chemically synthesized
acacccacagcuaaacagaauuc

SEQ ID NO: 80849 - RNA, 23 nt, Artificial Sequence
  Chemically synthesized
uccaggaaaugcauugguugugu

SEQ ID NO: 80850 - RNA, 23 nt, Artificial Sequence
  Chemically synthesized
ugcaaaacauaaugcuaauugca

SEQ ID NO: 80851 - RNA, 23 nt, Artificial Sequence
  Chemically synthesized
ccuucuaaugcauuaucagaaag

SEQ ID NO: 80852 - RNA, 23 nt, Artificial Sequence
  Chemically synthesized
ucuacugcauuugacagaaauua

SEQ ID NO: 80853 - RNA, 23 nt, Artificial Sequence
  Chemically synthesized
cggacauuuucaaaugaugcagg

SEQ ID NO: 80854 - RNA, 23 nt, Artificial Sequence
  Chemically synthesized
aggugaugggagucagcuucuuc

SEQ ID NO: 80855 - RNA, 23 nt, Artificial Sequence
  Chemically synthesized
ucucccaccaccacacacuugau

SEQ ID NO: 80856 - RNA, 23 nt, Artificial Sequence
  Chemically synthesized
cuugucauuuuagggcuaaauuu

SEQ ID NO: 80857 - RNA, 23 nt, Artificial Sequence
  Chemically synthesized
ugaggaaaacugcagagaaacag

SEQ ID NO: 80858 - RNA, 23 nt, Artificial Sequence
  Chemically synthesized
cacuucguauuuugucaaaauac

SEQ ID NO: 80859 - RNA, 23 nt, Artificial Sequence
  Chemically synthesized
agcacuagcacaguuuacagaac

SEQ ID NO: 80860 - RNA, 23 nt, Artificial Sequence
  Chemically synthesized
ugcugcuaacucacuggugaguu

SEQ ID NO: 80861 - RNA, 23 nt, Artificial Sequence
  Chemically synthesized
ucggcacaacaaugcaguguagu

SEQ ID NO: 80862 - RNA, 23 nt, Artificial Sequence
  Chemically synthesized
augucgggaacacgugcugcuaa

SEQ ID NO: 80863 - RNA, 23 nt, Artificial Sequence
  Chemically synthesized
agggaaaagcaaauuaagaacac

SEQ ID NO: 80864 - RNA, 23 nt, Artificial Sequence
  Chemically synthesized
ugucaaagacaguagggauauau

SEQ ID NO: 80865 - RNA, 23 nt, Artificial Sequence
  Chemically synthesized
caugcaaaacauaaugcuaauug

SEQ ID NO: 80866 - RNA, 23 nt, Artificial Sequence
  Chemically synthesized
acagaacaaccaguuuaaagaug

SEQ ID NO: 80867 - RNA, 23 nt, Artificial Sequence
  Chemically synthesized
uccgcaaaagcuggucagaaaac

SEQ ID NO: 80868 - RNA, 23 nt, Artificial Sequence
  Chemically synthesized
gucagaaaacucgcuaugaaauc

SEQ ID NO: 80869 - RNA, 23 nt, Artificial Sequence
  Chemically synthesized
gaacucuuacauuuagaacaaac

SEQ ID NO: 80870 - RNA, 23 nt, Artificial Sequence
  Chemically synthesized
acggacauuuucaaaugaugcag

SEQ ID NO: 80871 - RNA, 23 nt, Artificial Sequence
  Chemically synthesized
uggcaacucuuaaucugaacaag

SEQ ID NO: 80872 - RNA, 23 nt, Artificial Sequence
  Chemically synthesized
aagcugaggaaaacugcagagaa

SEQ ID NO: 80873 - RNA, 23 nt, Artificial Sequence
  Chemically synthesized
ccacccaaagcugaggaaaacug

SEQ ID NO: 80874 - RNA, 23 nt, Artificial Sequence
  Chemically synthesized
gugucgguaaucuggcaagacag

SEQ ID NO: 80875 - RNA, 23 nt, Artificial Sequence
  Chemically synthesized
cacuuauuagcucugaauaaagu

SEQ ID NO: 80876 - RNA, 23 nt, Artificial Sequence
  Chemically synthesized
cgagcacuccagguauuuuacag

SEQ ID NO: 80877 - RNA, 23 nt, Artificial Sequence
  Chemically synthesized
caagggaaaagcaaauuaagaac

SEQ ID NO: 80878 - RNA, 23 nt, Artificial Sequence
  Chemically synthesized
accauaacauuggcagaauaauu

SEQ ID NO: 80879 - RNA, 23 nt, Artificial Sequence
  Chemically synthesized
agugucgguaaucuggcaagaca

SEQ ID NO: 80880 - RNA, 23 nt, Artificial Sequence
  Chemically synthesized
ucugcaccuccuaacugcagaag

SEQ ID NO: 80881 - RNA, 23 nt, Artificial Sequence
  Chemically synthesized
cagaagcuaccgucuucucaaag

SEQ ID NO: 80882 - RNA, 23 nt, Artificial Sequence
  Chemically synthesized
cuggcaagacagugauguuaaga

SEQ ID NO: 80883 - RNA, 23 nt, Artificial Sequence
  Chemically synthesized
caccuaguuacuagaaaacuaag

SEQ ID NO: 80884 - RNA, 23 nt, Artificial Sequence
  Chemically synthesized
uaccauaacauuggcagaauaau

SEQ ID NO: 80885 - RNA, 23 nt, Artificial Sequence
  Chemically synthesized
uggcagaauaauugucaaagaca

SEQ ID NO: 80886 - RNA, 23 nt, Artificial Sequence
  Chemically synthesized
ugucgguaaucuggcaagacagu

SEQ ID NO: 80887 - RNA, 23 nt, Artificial Sequence
  Chemically synthesized
aacagaacaaccaguuuaaagau

SEQ ID NO: 80888 - RNA, 23 nt, Artificial Sequence
  Chemically synthesized
aacgcuucauucgggaggcuguu

SEQ ID NO: 80889 - RNA, 23 nt, Artificial Sequence
  Chemically synthesized
cuucuaaugcauuaucagaaaga

SEQ ID NO: 80890 - RNA, 23 nt, Artificial Sequence
  Chemically synthesized
ggaaaagcuuaagaaaacauuuc

SEQ ID NO: 80891 - RNA, 23 nt, Artificial Sequence
  Chemically synthesized
gacagaaauuaaccuuuuagagu

SEQ ID NO: 80892 - RNA, 23 nt, Artificial Sequence
  Chemically synthesized
cuccgcaaaagcuggucagaaaa

SEQ ID NO: 80893 - RNA, 23 nt, Artificial Sequence
  Chemically synthesized
aaagcacuuauuagcucugaaua

SEQ ID NO: 80894 - RNA, 23 nt, Artificial Sequence
  Chemically synthesized
aguaggcaaguuuuaccuacagc

SEQ ID NO: 80895 - RNA, 23 nt, Artificial Sequence
  Chemically synthesized
caauacugacccucuuuaccucg

SEQ ID NO: 80896 - RNA, 23 nt, Artificial Sequence
  Chemically synthesized
agacacgaucgagaaacugaagg

SEQ ID NO: 80897 - RNA, 23 nt, Artificial Sequence
  Chemically synthesized
aagacacgaucgagaaacugaag

SEQ ID NO: 80898 - RNA, 23 nt, Artificial Sequence
  Chemically synthesized
aaagacacgaucgagaaacugaa

SEQ ID NO: 80899 - RNA, 23 nt, Artificial Sequence
  Chemically synthesized
cccgugaagaagaggaagagaaa

SEQ ID NO: 80900 - RNA, 23 nt, Artificial Sequence
  Chemically synthesized
ggauacagcuggacaagaagauu

SEQ ID NO: 80901 - RNA, 23 nt, Artificial Sequence
  Chemically synthesized
gggauacagcuggacaagaagau

SEQ ID NO: 80902 - RNA, 23 nt, Artificial Sequence
  Chemically synthesized
ugggauacagcuggacaagaaga

SEQ ID NO: 80903 - RNA, 23 nt, Artificial Sequence
  Chemically synthesized
augggauacagcuggacaagaag

SEQ ID NO: 80904 - RNA, 23 nt, Artificial Sequence
  Chemically synthesized
uaugggauacagcuggacaagaa

SEQ ID NO: 80905 - RNA, 23 nt, Artificial Sequence
  Chemically synthesized
ccauguuacuuuauucagagcua

SEQ ID NO: 80906 - RNA, 23 nt, Artificial Sequence
  Chemically synthesized
uccauguuacuuuauucagagcu

SEQ ID NO: 80907 - RNA, 23 nt, Artificial Sequence
  Chemically synthesized
uuccauguuacuuuauucagagc

SEQ ID NO: 80908 - RNA, 23 nt, Artificial Sequence
  Chemically synthesized
uuuccauguuacuuuauucagag

SEQ ID NO: 80909 - RNA, 23 nt, Artificial Sequence
  Chemically synthesized
cuuuccauguuacuuuauucaga

SEQ ID NO: 80910 - RNA, 23 nt, Artificial Sequence
  Chemically synthesized
gaaaaugccugcuguuguaaaug

SEQ ID NO: 80911 - RNA, 23 nt, Artificial Sequence
  Chemically synthesized
agaaaaugccugcuguuguaaau

SEQ ID NO: 80912 - RNA, 23 nt, Artificial Sequence
  Chemically synthesized
gagaaaaugccugcuguuguaaa

SEQ ID NO: 80913 - RNA, 23 nt, Artificial Sequence
  Chemically synthesized
caaugcauuuccuggagaauaua

SEQ ID NO: 80914 - RNA, 23 nt, Artificial Sequence
  Chemically synthesized
ccaaugcauuuccuggagaauau

SEQ ID NO: 80915 - RNA, 23 nt, Artificial Sequence
  Chemically synthesized
accaaugcauuuccuggagaaua

SEQ ID NO: 80916 - RNA, 23 nt, Artificial Sequence
  Chemically synthesized
aaccaaugcauuuccuggagaau

SEQ ID NO: 80917 - RNA, 23 nt, Artificial Sequence
  Chemically synthesized
caaccaaugcauuuccuggagaa

SEQ ID NO: 80918 - RNA, 23 nt, Artificial Sequence
  Chemically synthesized
cacggguaaaaacucuaaaaggu

SEQ ID NO: 80919 - RNA, 23 nt, Artificial Sequence
  Chemically synthesized
ucacggguaaaaacucuaaaagg

SEQ ID NO: 80920 - RNA, 23 nt, Artificial Sequence
  Chemically synthesized
gucacggguaaaaacucuaaaag

SEQ ID NO: 80921 - RNA, 23 nt, Artificial Sequence
  Chemically synthesized
ugucacggguaaaaacucuaaaa

SEQ ID NO: 80922 - RNA, 23 nt, Artificial Sequence
  Chemically synthesized
gugucacggguaaaaacucuaaa

SEQ ID NO: 80923 - RNA, 23 nt, Artificial Sequence
  Chemically synthesized
caauguuaugguagauggaaaac

SEQ ID NO: 80924 - RNA, 23 nt, Artificial Sequence
  Chemically synthesized
ccaauguuaugguagauggaaaa

SEQ ID NO: 80925 - RNA, 23 nt, Artificial Sequence
  Chemically synthesized
gccaauguuaugguagauggaaa

SEQ ID NO: 80926 - RNA, 23 nt, Artificial Sequence
  Chemically synthesized
ugccaauguuaugguagauggaa

SEQ ID NO: 80927 - RNA, 23 nt, Artificial Sequence
  Chemically synthesized
cugccaauguuaugguagaugga

SEQ ID NO: 80928 - RNA, 23 nt, Artificial Sequence
  Chemically synthesized
ggacaagaagauuaugacagauu

SEQ ID NO: 80929 - RNA, 23 nt, Artificial Sequence
  Chemically synthesized
uggacaagaagauuaugacagau

SEQ ID NO: 80930 - RNA, 23 nt, Artificial Sequence
  Chemically synthesized
cuggacaagaagauuaugacaga

SEQ ID NO: 80931 - RNA, 23 nt, Artificial Sequence
  Chemically synthesized
gcuggacaagaagauuaugacag

SEQ ID NO: 80932 - RNA, 23 nt, Artificial Sequence
  Chemically synthesized
agcuggacaagaagauuaugaca

SEQ ID NO: 80933 - RNA, 23 nt, Artificial Sequence
  Chemically synthesized
ccuggagaauauaucccuacugu

SEQ ID NO: 80934 - RNA, 23 nt, Artificial Sequence
  Chemically synthesized
uccuggagaauauaucccuacug

SEQ ID NO: 80935 - RNA, 23 nt, Artificial Sequence
  Chemically synthesized
uuccuggagaauauaucccuacu

SEQ ID NO: 80936 - RNA, 23 nt, Artificial Sequence
  Chemically synthesized
uuuccuggagaauauaucccuac

SEQ ID NO: 80937 - RNA, 23 nt, Artificial Sequence
  Chemically synthesized
auuuccuggagaauauaucccua

SEQ ID NO: 80938 - RNA, 23 nt, Artificial Sequence
  Chemically synthesized
uguuaugguagauggaaaaccgg

SEQ ID NO: 80939 - RNA, 23 nt, Artificial Sequence
  Chemically synthesized
auguuaugguagauggaaaaccg

SEQ ID NO: 80940 - RNA, 23 nt, Artificial Sequence
  Chemically synthesized
aauguuaugguagauggaaaacc

SEQ ID NO: 80941 - RNA, 23 nt, Artificial Sequence
  Chemically synthesized
gaaagugucacggguaaaaacuc

SEQ ID NO: 80942 - RNA, 23 nt, Artificial Sequence
  Chemically synthesized
ugaaagugucacggguaaaaacu

SEQ ID NO: 80943 - RNA, 23 nt, Artificial Sequence
  Chemically synthesized
augaaagugucacggguaaaaac

SEQ ID NO: 80944 - RNA, 23 nt, Artificial Sequence
  Chemically synthesized
aaugaaagugucacggguaaaaa

SEQ ID NO: 80945 - RNA, 23 nt, Artificial Sequence
  Chemically synthesized
gaaugaaagugucacggguaaaa

SEQ ID NO: 80946 - RNA, 23 nt, Artificial Sequence
  Chemically synthesized
acaccgagcacugaacuuugcaa

SEQ ID NO: 80947 - RNA, 23 nt, Artificial Sequence
  Chemically synthesized
acaagaagauuaugacagauuac

SEQ ID NO: 80948 - RNA, 23 nt, Artificial Sequence
  Chemically synthesized
gacaagaagauuaugacagauua

SEQ ID NO: 80949 - RNA, 23 nt, Artificial Sequence
  Chemically synthesized
acggguaaaaacucuaaaagguu

SEQ ID NO: 80950 - RNA, 23 nt, Artificial Sequence
  Chemically synthesized
ccauucuuguucagauuaagagu

SEQ ID NO: 80951 - RNA, 23 nt, Artificial Sequence
  Chemically synthesized
cccauucuuguucagauuaagag

SEQ ID NO: 80952 - RNA, 23 nt, Artificial Sequence
  Chemically synthesized
ccccauucuuguucagauuaaga

SEQ ID NO: 80953 - RNA, 23 nt, Artificial Sequence
  Chemically synthesized
cccccauucuuguucagauuaag

SEQ ID NO: 80954 - RNA, 23 nt, Artificial Sequence
  Chemically synthesized
ccccccauucuuguucagauuaa

SEQ ID NO: 80955 - RNA, 23 nt, Artificial Sequence
  Chemically synthesized
caaagacaguauuuugacaaaau

SEQ ID NO: 80956 - RNA, 23 nt, Artificial Sequence
  Chemically synthesized
acaaagacaguauuuugacaaaa

SEQ ID NO: 80957 - RNA, 23 nt, Artificial Sequence
  Chemically synthesized
gacaaagacaguauuuugacaaa

SEQ ID NO: 80958 - RNA, 23 nt, Artificial Sequence
  Chemically synthesized
ggacaaagacaguauuuugacaa

SEQ ID NO: 80959 - RNA, 23 nt, Artificial Sequence
  Chemically synthesized
aggacaaagacaguauuuugaca

SEQ ID NO: 80960 - RNA, 23 nt, Artificial Sequence
  Chemically synthesized
gagaacaccgagcacugaacuuu

SEQ ID NO: 80961 - RNA, 23 nt, Artificial Sequence
  Chemically synthesized
cgagaacaccgagcacugaacuu

SEQ ID NO: 80962 - RNA, 23 nt, Artificial Sequence
  Chemically synthesized
ccgagaacaccgagcacugaacu

SEQ ID NO: 80963 - RNA, 23 nt, Artificial Sequence
  Chemically synthesized
gccgagaacaccgagcacugaac

SEQ ID NO: 80964 - RNA, 23 nt, Artificial Sequence
  Chemically synthesized
ugccgagaacaccgagcacugaa

SEQ ID NO: 80965 - RNA, 23 nt, Artificial Sequence
  Chemically synthesized
aacuaugaaccuucuuaacauca

SEQ ID NO: 80966 - RNA, 23 nt, Artificial Sequence
  Chemically synthesized
aaacuaugaaccuucuuaacauc

SEQ ID NO: 80967 - RNA, 23 nt, Artificial Sequence
  Chemically synthesized
uaaacuaugaaccuucuuaacau

SEQ ID NO: 80968 - RNA, 23 nt, Artificial Sequence
  Chemically synthesized
ugaucaaaggacaaagacaguau

SEQ ID NO: 80969 - RNA, 23 nt, Artificial Sequence
  Chemically synthesized
gugaucaaaggacaaagacagua

SEQ ID NO: 80970 - RNA, 23 nt, Artificial Sequence
  Chemically synthesized
ugugaucaaaggacaaagacagu

SEQ ID NO: 80971 - RNA, 23 nt, Artificial Sequence
  Chemically synthesized
gugugaucaaaggacaaagacag

SEQ ID NO: 80972 - RNA, 23 nt, Artificial Sequence
  Chemically synthesized
aauaccuucugaacuacacugca

SEQ ID NO: 80973 - RNA, 23 nt, Artificial Sequence
  Chemically synthesized
gauaaagacacgaucgagaaacu

SEQ ID NO: 80974 - RNA, 23 nt, Artificial Sequence
  Chemically synthesized
ugauaaagacacgaucgagaaac

SEQ ID NO: 80975 - RNA, 23 nt, Artificial Sequence
  Chemically synthesized
augauaaagacacgaucgagaaa

SEQ ID NO: 80976 - RNA, 23 nt, Artificial Sequence
  Chemically synthesized
gaugauaaagacacgaucgagaa

SEQ ID NO: 80977 - RNA, 23 nt, Artificial Sequence
  Chemically synthesized
ggaugauaaagacacgaucgaga

SEQ ID NO: 80978 - RNA, 23 nt, Artificial Sequence
  Chemically synthesized
gcauuuccuggagaauauauccc

SEQ ID NO: 80979 - RNA, 23 nt, Artificial Sequence
  Chemically synthesized
ugcauuuccuggagaauauaucc

SEQ ID NO: 80980 - RNA, 23 nt, Artificial Sequence
  Chemically synthesized
augcauuuccuggagaauauauc

SEQ ID NO: 80981 - RNA, 23 nt, Artificial Sequence
  Chemically synthesized
aaugcauuuccuggagaauauau

SEQ ID NO: 80982 - RNA, 23 nt, Artificial Sequence
  Chemically synthesized
cauuguugugccgagaacaccga

SEQ ID NO: 80983 - RNA, 23 nt, Artificial Sequence
  Chemically synthesized
aguucucagaugcguaaagcaga

SEQ ID NO: 80984 - RNA, 23 nt, Artificial Sequence
  Chemically synthesized
gugcaaagugguauccugaggug

SEQ ID NO: 80985 - RNA, 23 nt, Artificial Sequence
  Chemically synthesized
cgugcaaagugguauccugaggu

SEQ ID NO: 80986 - RNA, 23 nt, Artificial Sequence
  Chemically synthesized
ccgugcaaagugguauccugagg

SEQ ID NO: 80987 - RNA, 23 nt, Artificial Sequence
  Chemically synthesized
uccgugcaaagugguauccugag

SEQ ID NO: 80988 - RNA, 23 nt, Artificial Sequence
  Chemically synthesized
guccgugcaaagugguauccuga

SEQ ID NO: 80989 - RNA, 23 nt, Artificial Sequence
  Chemically synthesized
cauguguugcagcuuuauaguuu

SEQ ID NO: 80990 - RNA, 23 nt, Artificial Sequence
  Chemically synthesized
aauacgaaguggagauuuacacu

SEQ ID NO: 80991 - RNA, 23 nt, Artificial Sequence
  Chemically synthesized
aaauacgaaguggagauuuacac

SEQ ID NO: 80992 - RNA, 23 nt, Artificial Sequence
  Chemically synthesized
aaaauacgaaguggagauuuaca

SEQ ID NO: 80993 - RNA, 23 nt, Artificial Sequence
  Chemically synthesized
caaaauacgaaguggagauuuac

SEQ ID NO: 80994 - RNA, 23 nt, Artificial Sequence
  Chemically synthesized
acaaaauacgaaguggagauuua

SEQ ID NO: 80995 - RNA, 23 nt, Artificial Sequence
  Chemically synthesized
gucuuugugauuucauagcgagu

SEQ ID NO: 80996 - RNA, 23 nt, Artificial Sequence
  Chemically synthesized
agucuuugugauuucauagcgag

SEQ ID NO: 80997 - RNA, 23 nt, Artificial Sequence
  Chemically synthesized
gcuguaaaauaccuggagugcuc

SEQ ID NO: 80998 - RNA, 23 nt, Artificial Sequence
  Chemically synthesized
gguaaaaacucuaaaagguuaau

SEQ ID NO: 80999 - RNA, 23 nt, Artificial Sequence
  Chemically synthesized
ggguaaaaacucuaaaagguuaa

SEQ ID NO: 81000 - RNA, 23 nt, Artificial Sequence
  Chemically synthesized
cggguaaaaacucuaaaagguua

SEQ ID NO: 81001 - RNA, 23 nt, Artificial Sequence
  Chemically synthesized
uaaagacacgaucgagaaacuga

SEQ ID NO: 81002 - RNA, 23 nt, Artificial Sequence
  Chemically synthesized
auaaagacacgaucgagaaacug

SEQ ID NO: 81003 - RNA, 23 nt, Artificial Sequence
  Chemically synthesized
gcuaauaagugcuuuccuuaguu

SEQ ID NO: 81004 - RNA, 23 nt, Artificial Sequence
  Chemically synthesized
agcuaauaagugcuuuccuuagu

SEQ ID NO: 81005 - RNA, 23 nt, Artificial Sequence
  Chemically synthesized
gagcuaauaagugcuuuccuuag

SEQ ID NO: 81006 - RNA, 23 nt, Artificial Sequence
  Chemically synthesized
agagcuaauaagugcuuuccuua

SEQ ID NO: 81007 - RNA, 23 nt, Artificial Sequence
  Chemically synthesized
cagagcuaauaagugcuuuccuu

SEQ ID NO: 81008 - RNA, 23 nt, Artificial Sequence
  Chemically synthesized
ugcuuuccauguuacuuuauuca

SEQ ID NO: 81009 - RNA, 23 nt, Artificial Sequence
  Chemically synthesized
gugcuuuccauguuacuuuauuc

SEQ ID NO: 81010 - RNA, 23 nt, Artificial Sequence
  Chemically synthesized
agugcuuuccauguuacuuuauu

SEQ ID NO: 81011 - RNA, 23 nt, Artificial Sequence
  Chemically synthesized
aagugcuuuccauguuacuuuau

SEQ ID NO: 81012 - RNA, 23 nt, Artificial Sequence
  Chemically synthesized
aaagugcuuuccauguuacuuua

SEQ ID NO: 81013 - RNA, 23 nt, Artificial Sequence
  Chemically synthesized
agugucacggguaaaaacucuaa

SEQ ID NO: 81014 - RNA, 23 nt, Artificial Sequence
  Chemically synthesized
ggaaugaaagugucacggguaaa

SEQ ID NO: 81015 - RNA, 23 nt, Artificial Sequence
  Chemically synthesized
aggaaugaaagugucacggguaa

SEQ ID NO: 81016 - RNA, 23 nt, Artificial Sequence
  Chemically synthesized
aaggaaugaaagugucacgggua

SEQ ID NO: 81017 - RNA, 23 nt, Artificial Sequence
  Chemically synthesized
aggccucaagacaguguuugacg

SEQ ID NO: 81018 - RNA, 23 nt, Artificial Sequence
  Chemically synthesized
gaggccucaagacaguguuugac

SEQ ID NO: 81019 - RNA, 23 nt, Artificial Sequence
  Chemically synthesized
cgaggccucaagacaguguuuga

SEQ ID NO: 81020 - RNA, 23 nt, Artificial Sequence
  Chemically synthesized
uguccgugcaaagugguauccug

SEQ ID NO: 81021 - RNA, 23 nt, Artificial Sequence
  Chemically synthesized
cagcuggacaagaagauuaugac

SEQ ID NO: 81022 - RNA, 23 nt, Artificial Sequence
  Chemically synthesized
acagcuggacaagaagauuauga

SEQ ID NO: 81023 - RNA, 23 nt, Artificial Sequence
  Chemically synthesized
uacagcuggacaagaagauuaug

SEQ ID NO: 81024 - RNA, 23 nt, Artificial Sequence
  Chemically synthesized
auacagcuggacaagaagauuau

SEQ ID NO: 81025 - RNA, 23 nt, Artificial Sequence
  Chemically synthesized
uaguaaaagugcuuuccauguua

SEQ ID NO: 81026 - RNA, 23 nt, Artificial Sequence
  Chemically synthesized
uuaguaaaagugcuuuccauguu

SEQ ID NO: 81027 - RNA, 23 nt, Artificial Sequence
  Chemically synthesized
auuaguaaaagugcuuuccaugu

SEQ ID NO: 81028 - RNA, 23 nt, Artificial Sequence
  Chemically synthesized
gauuaguaaaagugcuuuccaug

SEQ ID NO: 81029 - RNA, 23 nt, Artificial Sequence
  Chemically synthesized
aaagugucacggguaaaaacucu

SEQ ID NO: 81030 - RNA, 23 nt, Artificial Sequence
  Chemically synthesized
gaacagccucccgaaugaagcgu

SEQ ID NO: 81031 - RNA, 23 nt, Artificial Sequence
  Chemically synthesized
agaacagccucccgaaugaagcg

SEQ ID NO: 81032 - RNA, 23 nt, Artificial Sequence
  Chemically synthesized
cagaacagccucccgaaugaagc

SEQ ID NO: 81033 - RNA, 23 nt, Artificial Sequence
  Chemically synthesized
gcagaacagccucccgaaugaag

SEQ ID NO: 81034 - RNA, 23 nt, Artificial Sequence
  Chemically synthesized
agcagaacagccucccgaaugaa

SEQ ID NO: 81035 - RNA, 23 nt, Artificial Sequence
  Chemically synthesized
aaauguaagaguucagacucaca

SEQ ID NO: 81036 - RNA, 23 nt, Artificial Sequence
  Chemically synthesized
ucccgugaagaagaggaagagaa

SEQ ID NO: 81037 - RNA, 23 nt, Artificial Sequence
  Chemically synthesized
cucccgugaagaagaggaagaga

SEQ ID NO: 81038 - RNA, 23 nt, Artificial Sequence
  Chemically synthesized
gaaucugggcuuaugggauacag

SEQ ID NO: 81039 - RNA, 23 nt, Artificial Sequence
  Chemically synthesized
ugaaucugggcuuaugggauaca

SEQ ID NO: 81040 - RNA, 23 nt, Artificial Sequence
  Chemically synthesized
gugaaucugggcuuaugggauac

SEQ ID NO: 81041 - RNA, 23 nt, Artificial Sequence
  Chemically synthesized
ggugaaucugggcuuaugggaua

SEQ ID NO: 81042 - RNA, 23 nt, Artificial Sequence
  Chemically synthesized
cggugaaucugggcuuaugggau

SEQ ID NO: 81043 - RNA, 23 nt, Artificial Sequence
  Chemically synthesized
guuacuuuauucagagcuaauaa

SEQ ID NO: 81044 - RNA, 23 nt, Artificial Sequence
  Chemically synthesized
uguuacuuuauucagagcuaaua

SEQ ID NO: 81045 - RNA, 23 nt, Artificial Sequence
  Chemically synthesized
auguuacuuuauucagagcuaau

SEQ ID NO: 81046 - RNA, 23 nt, Artificial Sequence
  Chemically synthesized
cauguuacuuuauucagagcuaa

SEQ ID NO: 81047 - RNA, 23 nt, Artificial Sequence
  Chemically synthesized
aaaagugcuuuccauguuacuuu

SEQ ID NO: 81048 - RNA, 23 nt, Artificial Sequence
  Chemically synthesized
uaaaagugcuuuccauguuacuu

SEQ ID NO: 81049 - RNA, 23 nt, Artificial Sequence
  Chemically synthesized
guaaaagugcuuuccauguuacu

SEQ ID NO: 81050 - RNA, 23 nt, Artificial Sequence
  Chemically synthesized
aguaaaagugcuuuccauguuac

SEQ ID NO: 81051 - RNA, 23 nt, Artificial Sequence
  Chemically synthesized
aaggacaaagacaguauuuugac

SEQ ID NO: 81052 - RNA, 23 nt, Artificial Sequence
  Chemically synthesized
aaaggacaaagacaguauuuuga

SEQ ID NO: 81053 - RNA, 23 nt, Artificial Sequence
  Chemically synthesized
caaaggacaaagacaguauuuug

SEQ ID NO: 81054 - RNA, 23 nt, Artificial Sequence
  Chemically synthesized
ucaaaggacaaagacaguauuuu

SEQ ID NO: 81055 - RNA, 23 nt, Artificial Sequence
  Chemically synthesized
aucaaaggacaaagacaguauuu

SEQ ID NO: 81056 - RNA, 23 nt, Artificial Sequence
  Chemically synthesized
gaucaaaggacaaagacaguauu

SEQ ID NO: 81057 - RNA, 23 nt, Artificial Sequence
  Chemically synthesized
ccaacuuuuuguuacagauuaau

SEQ ID NO: 81058 - RNA, 23 nt, Artificial Sequence
  Chemically synthesized
gccaacuuuuuguuacagauuaa

SEQ ID NO: 81059 - RNA, 23 nt, Artificial Sequence
  Chemically synthesized
ugccaacuuuuuguuacagauua

SEQ ID NO: 81060 - RNA, 23 nt, Artificial Sequence
  Chemically synthesized
augccaacuuuuuguuacagauu

SEQ ID NO: 81061 - RNA, 23 nt, Artificial Sequence
  Chemically synthesized
aaugccaacuuuuuguuacagau

SEQ ID NO: 81062 - RNA, 23 nt, Artificial Sequence
  Chemically synthesized
cacucaaugccaacuuuuuguua

SEQ ID NO: 81063 - RNA, 23 nt, Artificial Sequence
  Chemically synthesized
gcacucaaugccaacuuuuuguu

SEQ ID NO: 81064 - RNA, 23 nt, Artificial Sequence
  Chemically synthesized
cuuaguaagugcuuuucuuauag

SEQ ID NO: 81065 - RNA, 23 nt, Artificial Sequence
  Chemically synthesized
acuuaguaagugcuuuucuuaua

SEQ ID NO: 81066 - RNA, 23 nt, Artificial Sequence
  Chemically synthesized
aacuuaguaagugcuuuucuuau

SEQ ID NO: 81067 - RNA, 23 nt, Artificial Sequence
  Chemically synthesized
uaacuuaguaagugcuuuucuua

SEQ ID NO: 81068 - RNA, 23 nt, Artificial Sequence
  Chemically synthesized
cuaacuuaguaagugcuuuucuu

SEQ ID NO: 81069 - RNA, 23 nt, Artificial Sequence
  Chemically synthesized
aguggagauuuacacuacauugu

SEQ ID NO: 81070 - RNA, 23 nt, Artificial Sequence
  Chemically synthesized
aaguggagauuuacacuacauug

SEQ ID NO: 81071 - RNA, 23 nt, Artificial Sequence
  Chemically synthesized
gaaguggagauuuacacuacauu

SEQ ID NO: 81072 - RNA, 23 nt, Artificial Sequence
  Chemically synthesized
cgaaguggagauuuacacuacau

SEQ ID NO: 81073 - RNA, 23 nt, Artificial Sequence
  Chemically synthesized
acgaaguggagauuuacacuaca

SEQ ID NO: 81074 - RNA, 23 nt, Artificial Sequence
  Chemically synthesized
ccggugaaucugggcuuauggga

SEQ ID NO: 81075 - RNA, 23 nt, Artificial Sequence
  Chemically synthesized
accggugaaucugggcuuauggg

SEQ ID NO: 81076 - RNA, 23 nt, Artificial Sequence
  Chemically synthesized
aaccggugaaucugggcuuaugg

SEQ ID NO: 81077 - RNA, 23 nt, Artificial Sequence
  Chemically synthesized
aaaccggugaaucugggcuuaug

SEQ ID NO: 81078 - RNA, 23 nt, Artificial Sequence
  Chemically synthesized
caguuaggaggugcagacacuug

SEQ ID NO: 81079 - RNA, 23 nt, Artificial Sequence
  Chemically synthesized
gcaguuaggaggugcagacacuu

SEQ ID NO: 81080 - RNA, 23 nt, Artificial Sequence
  Chemically synthesized
ugcaguuaggaggugcagacacu

SEQ ID NO: 81081 - RNA, 23 nt, Artificial Sequence
  Chemically synthesized
cugcaguuaggaggugcagacac

SEQ ID NO: 81082 - RNA, 23 nt, Artificial Sequence
  Chemically synthesized
ucugcaguuaggaggugcagaca

SEQ ID NO: 81083 - RNA, 23 nt, Artificial Sequence
  Chemically synthesized
caagaagauuaugacagauuacg

SEQ ID NO: 81084 - RNA, 23 nt, Artificial Sequence
  Chemically synthesized
gacaaaauacgaaguggagauuu

SEQ ID NO: 81085 - RNA, 23 nt, Artificial Sequence
  Chemically synthesized
ugacaaaauacgaaguggagauu

SEQ ID NO: 81086 - RNA, 23 nt, Artificial Sequence
  Chemically synthesized
uugacaaaauacgaaguggagau

SEQ ID NO: 81087 - RNA, 23 nt, Artificial Sequence
  Chemically synthesized
uuugacaaaauacgaaguggaga

SEQ ID NO: 81088 - RNA, 23 nt, Artificial Sequence
  Chemically synthesized
uuuugacaaaauacgaaguggag

SEQ ID NO: 81089 - RNA, 23 nt, Artificial Sequence
  Chemically synthesized
auuuugacaaaauacgaagugga

SEQ ID NO: 81090 - RNA, 23 nt, Artificial Sequence
  Chemically synthesized
agaaacugaaggagaagaagcug

SEQ ID NO: 81091 - RNA, 23 nt, Artificial Sequence
  Chemically synthesized
gagaaacugaaggagaagaagcu

SEQ ID NO: 81092 - RNA, 23 nt, Artificial Sequence
  Chemically synthesized
caacacucccaucauccuagugg

SEQ ID NO: 81093 - RNA, 23 nt, Artificial Sequence
  Chemically synthesized
ccaacacucccaucauccuagug

SEQ ID NO: 81094 - RNA, 23 nt, Artificial Sequence
  Chemically synthesized
cccaacacucccaucauccuagu

SEQ ID NO: 81095 - RNA, 23 nt, Artificial Sequence
  Chemically synthesized
ucccaacacucccaucauccuag

SEQ ID NO: 81096 - RNA, 23 nt, Artificial Sequence
  Chemically synthesized
gucccaacacucccaucauccua

SEQ ID NO: 81097 - RNA, 23 nt, Artificial Sequence
  Chemically synthesized
cuuaugggauacagcuggacaag

SEQ ID NO: 81098 - RNA, 23 nt, Artificial Sequence
  Chemically synthesized
gcuuaugggauacagcuggacaa

SEQ ID NO: 81099 - RNA, 23 nt, Artificial Sequence
  Chemically synthesized
ggcuuaugggauacagcuggaca

SEQ ID NO: 81100 - RNA, 23 nt, Artificial Sequence
  Chemically synthesized
gggcuuaugggauacagcuggac

SEQ ID NO: 81101 - RNA, 23 nt, Artificial Sequence
  Chemically synthesized
ugggcuuaugggauacagcugga

SEQ ID NO: 81102 - RNA, 23 nt, Artificial Sequence
  Chemically synthesized
ucugccaauguuaugguagaugg

SEQ ID NO: 81103 - RNA, 23 nt, Artificial Sequence
  Chemically synthesized
uucugccaauguuaugguagaug

SEQ ID NO: 81104 - RNA, 23 nt, Artificial Sequence
  Chemically synthesized
auucugccaauguuaugguagau

SEQ ID NO: 81105 - RNA, 23 nt, Artificial Sequence
  Chemically synthesized
uauucugccaauguuaugguaga

SEQ ID NO: 81106 - RNA, 23 nt, Artificial Sequence
  Chemically synthesized
caauuauucugccaauguuaugg

SEQ ID NO: 81107 - RNA, 23 nt, Artificial Sequence
  Chemically synthesized
acaauuauucugccaauguuaug

SEQ ID NO: 81108 - RNA, 23 nt, Artificial Sequence
  Chemically synthesized
gacaauuauucugccaauguuau

SEQ ID NO: 81109 - RNA, 23 nt, Artificial Sequence
  Chemically synthesized
ugacaauuauucugccaauguua

SEQ ID NO: 81110 - RNA, 23 nt, Artificial Sequence
  Chemically synthesized
uugacaauuauucugccaauguu

SEQ ID NO: 81111 - RNA, 23 nt, Artificial Sequence
  Chemically synthesized
ugaucaguuacacaaccaaugca

SEQ ID NO: 81112 - RNA, 23 nt, Artificial Sequence
  Chemically synthesized
cugaucaguuacacaaccaaugc

SEQ ID NO: 81113 - RNA, 23 nt, Artificial Sequence
  Chemically synthesized
acugaucaguuacacaaccaaug

SEQ ID NO: 81114 - RNA, 23 nt, Artificial Sequence
  Chemically synthesized
uacugaucaguuacacaaccaau

SEQ ID NO: 81115 - RNA, 23 nt, Artificial Sequence
  Chemically synthesized
ccucccgugaagaagaggaagag

SEQ ID NO: 81116 - RNA, 23 nt, Artificial Sequence
  Chemically synthesized
gccucccgugaagaagaggaaga

SEQ ID NO: 81117 - RNA, 23 nt, Artificial Sequence
  Chemically synthesized
uuaugggauacagcuggacaaga

SEQ ID NO: 81118 - RNA, 23 nt, Artificial Sequence
  Chemically synthesized
guugcagcuuuauaguuuuuaaa

SEQ ID NO: 81119 - RNA, 23 nt, Artificial Sequence
  Chemically synthesized
uguugcagcuuuauaguuuuuaa

SEQ ID NO: 81120 - RNA, 23 nt, Artificial Sequence
  Chemically synthesized
guguugcagcuuuauaguuuuua

SEQ ID NO: 81121 - RNA, 23 nt, Artificial Sequence
  Chemically synthesized
uguguugcagcuuuauaguuuuu

SEQ ID NO: 81122 - RNA, 23 nt, Artificial Sequence
  Chemically synthesized
auguguugcagcuuuauaguuuu

SEQ ID NO: 81123 - RNA, 23 nt, Artificial Sequence
  Chemically synthesized
aagcagaacagccucccgaauga

SEQ ID NO: 81124 - RNA, 23 nt, Artificial Sequence
  Chemically synthesized
gacgguagcuucugcaguuagga

SEQ ID NO: 81125 - RNA, 23 nt, Artificial Sequence
  Chemically synthesized
agacgguagcuucugcaguuagg

SEQ ID NO: 81126 - RNA, 23 nt, Artificial Sequence
  Chemically synthesized
aagacgguagcuucugcaguuag

SEQ ID NO: 81127 - RNA, 23 nt, Artificial Sequence
  Chemically synthesized
gaagacgguagcuucugcaguua

SEQ ID NO: 81128 - RNA, 23 nt, Artificial Sequence
  Chemically synthesized
agaagacgguagcuucugcaguu

SEQ ID NO: 81129 - RNA, 23 nt, Artificial Sequence
  Chemically synthesized
gaagaggaagagaaaaugccugc

SEQ ID NO: 81130 - RNA, 23 nt, Artificial Sequence
  Chemically synthesized
cuacugucuuugacaauuauucu

SEQ ID NO: 81131 - RNA, 23 nt, Artificial Sequence
  Chemically synthesized
ccuacugucuuugacaauuauuc

SEQ ID NO: 81132 - RNA, 23 nt, Artificial Sequence
  Chemically synthesized
cccuacugucuuugacaauuauu

SEQ ID NO: 81133 - RNA, 23 nt, Artificial Sequence
  Chemically synthesized
ucccuacugucuuugacaauuau

SEQ ID NO: 81134 - RNA, 23 nt, Artificial Sequence
  Chemically synthesized
aucccuacugucuuugacaauua

SEQ ID NO: 81135 - RNA, 23 nt, Artificial Sequence
  Chemically synthesized
aagugucacggguaaaaacucua

SEQ ID NO: 81136 - RNA, 23 nt, Artificial Sequence
  Chemically synthesized
guggagauuuacacuacauugua

SEQ ID NO: 81137 - RNA, 23 nt, Artificial Sequence
  Chemically synthesized
ucuuagggaugauaaagacacga

SEQ ID NO: 81138 - RNA, 23 nt, Artificial Sequence
  Chemically synthesized
aucuuagggaugauaaagacacg

SEQ ID NO: 81139 - RNA, 23 nt, Artificial Sequence
  Chemically synthesized
gaucuuagggaugauaaagacac

SEQ ID NO: 81140 - RNA, 23 nt, Artificial Sequence
  Chemically synthesized
uugaaaauguccgugcaaagugg

SEQ ID NO: 81141 - RNA, 23 nt, Artificial Sequence
  Chemically synthesized
uuugaaaauguccgugcaaagug

SEQ ID NO: 81142 - RNA, 23 nt, Artificial Sequence
  Chemically synthesized
auuugaaaauguccgugcaaagu

SEQ ID NO: 81143 - RNA, 23 nt, Artificial Sequence
  Chemically synthesized
cauuugaaaauguccgugcaaag

SEQ ID NO: 81144 - RNA, 23 nt, Artificial Sequence
  Chemically synthesized
ucauuugaaaauguccgugcaaa

SEQ ID NO: 81145 - RNA, 23 nt, Artificial Sequence
  Chemically synthesized
acaguugcagaauuguggagugu

SEQ ID NO: 81146 - RNA, 23 nt, Artificial Sequence
  Chemically synthesized
gacaguugcagaauuguggagug

SEQ ID NO: 81147 - RNA, 23 nt, Artificial Sequence
  Chemically synthesized
ugacaguugcagaauuguggagu

SEQ ID NO: 81148 - RNA, 23 nt, Artificial Sequence
  Chemically synthesized
uugacaguugcagaauuguggag

SEQ ID NO: 81149 - RNA, 23 nt, Artificial Sequence
  Chemically synthesized
auugacaguugcagaauugugga

SEQ ID NO: 81150 - RNA, 23 nt, Artificial Sequence
  Chemically synthesized
agaagguuuuuuugucgauuagu

SEQ ID NO: 81151 - RNA, 23 nt, Artificial Sequence
  Chemically synthesized
uagaagguuuuuuugucgauuag

SEQ ID NO: 81152 - RNA, 23 nt, Artificial Sequence
  Chemically synthesized
uuagaagguuuuuuugucgauua

SEQ ID NO: 81153 - RNA, 23 nt, Artificial Sequence
  Chemically synthesized
auuagaagguuuuuuugucgauu

SEQ ID NO: 81154 - RNA, 23 nt, Artificial Sequence
  Chemically synthesized
cauuagaagguuuuuuugucgau

SEQ ID NO: 81155 - RNA, 23 nt, Artificial Sequence
  Chemically synthesized
ucuguuagucgcuaacuuaguaa

SEQ ID NO: 81156 - RNA, 23 nt, Artificial Sequence
  Chemically synthesized
uucuguuagucgcuaacuuagua

SEQ ID NO: 81157 - RNA, 23 nt, Artificial Sequence
  Chemically synthesized
guucuguuagucgcuaacuuagu

SEQ ID NO: 81158 - RNA, 23 nt, Artificial Sequence
  Chemically synthesized
uguucuguuagucgcuaacuuag

SEQ ID NO: 81159 - RNA, 23 nt, Artificial Sequence
  Chemically synthesized
uuguucuguuagucgcuaacuua

SEQ ID NO: 81160 - RNA, 23 nt, Artificial Sequence
  Chemically synthesized
caaugccaacuuuuuguuacaga

SEQ ID NO: 81161 - RNA, 23 nt, Artificial Sequence
  Chemically synthesized
cgccucccgugaagaagaggaag

SEQ ID NO: 81162 - RNA, 23 nt, Artificial Sequence
  Chemically synthesized
ccgccucccgugaagaagaggaa

SEQ ID NO: 81163 - RNA, 23 nt, Artificial Sequence
  Chemically synthesized
aaucugggcuuaugggauacagc

SEQ ID NO: 81164 - RNA, 23 nt, Artificial Sequence
  Chemically synthesized
uuugacaauuauucugccaaugu

SEQ ID NO: 81165 - RNA, 23 nt, Artificial Sequence
  Chemically synthesized
cuuugacaauuauucugccaaug

SEQ ID NO: 81166 - RNA, 23 nt, Artificial Sequence
  Chemically synthesized
ucuuugacaauuauucugccaau

SEQ ID NO: 81167 - RNA, 23 nt, Artificial Sequence
  Chemically synthesized
gguuguucuguuagucgcuaacu

SEQ ID NO: 81168 - RNA, 23 nt, Artificial Sequence
  Chemically synthesized
ugguuguucuguuagucgcuaac

SEQ ID NO: 81169 - RNA, 23 nt, Artificial Sequence
  Chemically synthesized
cugguuguucuguuagucgcuaa

SEQ ID NO: 81170 - RNA, 23 nt, Artificial Sequence
  Chemically synthesized
acugguuguucuguuagucgcua

SEQ ID NO: 81171 - RNA, 23 nt, Artificial Sequence
  Chemically synthesized
aacugguuguucuguuagucgcu

SEQ ID NO: 81172 - RNA, 23 nt, Artificial Sequence
  Chemically synthesized
ugucccaacacucccaucauccu

SEQ ID NO: 81173 - RNA, 23 nt, Artificial Sequence
  Chemically synthesized
cugucccaacacucccaucaucc

SEQ ID NO: 81174 - RNA, 23 nt, Artificial Sequence
  Chemically synthesized
acugucccaacacucccaucauc

SEQ ID NO: 81175 - RNA, 23 nt, Artificial Sequence
  Chemically synthesized
cacugucccaacacucccaucau

SEQ ID NO: 81176 - RNA, 23 nt, Artificial Sequence
  Chemically synthesized
ugaaaauguccgugcaaaguggu

SEQ ID NO: 81177 - RNA, 23 nt, Artificial Sequence
  Chemically synthesized
cuugugaguccugcaucauuuga

SEQ ID NO: 81178 - RNA, 23 nt, Artificial Sequence
  Chemically synthesized
gaucaguuacacaaccaaugcau

SEQ ID NO: 81179 - RNA, 23 nt, Artificial Sequence
  Chemically synthesized
ggagauuuacacuacauuguaca

SEQ ID NO: 81180 - RNA, 23 nt, Artificial Sequence
  Chemically synthesized
uggagauuuacacuacauuguac

SEQ ID NO: 81181 - RNA, 23 nt, Artificial Sequence
  Chemically synthesized
aagaagcugacucccaucaccua

SEQ ID NO: 81182 - RNA, 23 nt, Artificial Sequence
  Chemically synthesized
cuaaauguaagaguucagacuca

SEQ ID NO: 81183 - RNA, 23 nt, Artificial Sequence
  Chemically synthesized
ucuaaauguaagaguucagacuc

SEQ ID NO: 81184 - RNA, 23 nt, Artificial Sequence
  Chemically synthesized
uucuaaauguaagaguucagacu

SEQ ID NO: 81185 - RNA, 23 nt, Artificial Sequence
  Chemically synthesized
guucuaaauguaagaguucagac

SEQ ID NO: 81186 - RNA, 23 nt, Artificial Sequence
  Chemically synthesized
uguucuaaauguaagaguucaga

SEQ ID NO: 81187 - RNA, 23 nt, Artificial Sequence
  Chemically synthesized
gaaggagaagaagcugacuccca

SEQ ID NO: 81188 - RNA, 23 nt, Artificial Sequence
  Chemically synthesized
aucauuugaaaauguccgugcaa

SEQ ID NO: 81189 - RNA, 23 nt, Artificial Sequence
  Chemically synthesized
caucauuugaaaauguccgugca

SEQ ID NO: 81190 - RNA, 23 nt, Artificial Sequence
  Chemically synthesized
aaaaccggugaaucugggcuuau

SEQ ID NO: 81191 - RNA, 23 nt, Artificial Sequence
  Chemically synthesized
gaaaaccggugaaucugggcuua

SEQ ID NO: 81192 - RNA, 23 nt, Artificial Sequence
  Chemically synthesized
guuagucgcuaacuuaguaagug

SEQ ID NO: 81193 - RNA, 23 nt, Artificial Sequence
  Chemically synthesized
uguuagucgcuaacuuaguaagu

SEQ ID NO: 81194 - RNA, 23 nt, Artificial Sequence
  Chemically synthesized
cuguuagucgcuaacuuaguaag

SEQ ID NO: 81195 - RNA, 23 nt, Artificial Sequence
  Chemically synthesized
aagaaagguugguauuaucagga

SEQ ID NO: 81196 - RNA, 23 nt, Artificial Sequence
  Chemically synthesized
aaagaaagguugguauuaucagg

SEQ ID NO: 81197 - RNA, 23 nt, Artificial Sequence
  Chemically synthesized
uacgaaguggagauuuacacuac

SEQ ID NO: 81198 - RNA, 23 nt, Artificial Sequence
  Chemically synthesized
auacgaaguggagauuuacacua

SEQ ID NO: 81199 - RNA, 23 nt, Artificial Sequence
  Chemically synthesized
gauacagcuggacaagaagauua

SEQ ID NO: 81200 - RNA, 23 nt, Artificial Sequence
  Chemically synthesized
guuuugcauguaugacuuaauaa

SEQ ID NO: 81201 - RNA, 23 nt, Artificial Sequence
  Chemically synthesized
aauugacaguugcagaauugugg

SEQ ID NO: 81202 - RNA, 23 nt, Artificial Sequence
  Chemically synthesized
aaauugacaguugcagaauugug

SEQ ID NO: 81203 - RNA, 23 nt, Artificial Sequence
  Chemically synthesized
gucacuugaccaauacugacccu

SEQ ID NO: 81204 - RNA, 23 nt, Artificial Sequence
  Chemically synthesized
ugucacuugaccaauacugaccc

SEQ ID NO: 81205 - RNA, 23 nt, Artificial Sequence
  Chemically synthesized
cugucacuugaccaauacugacc

SEQ ID NO: 81206 - RNA, 23 nt, Artificial Sequence
  Chemically synthesized
gaagguuuuuuugucgauuagua

SEQ ID NO: 81207 - RNA, 23 nt, Artificial Sequence
  Chemically synthesized
guuguucuguuagucgcuaacuu

SEQ ID NO: 81208 - RNA, 23 nt, Artificial Sequence
  Chemically synthesized
guagcuucugcaguuaggaggug

SEQ ID NO: 81209 - RNA, 23 nt, Artificial Sequence
  Chemically synthesized
gguagcuucugcaguuaggaggu

SEQ ID NO: 81210 - RNA, 23 nt, Artificial Sequence
  Chemically synthesized
cgguagcuucugcaguuaggagg

SEQ ID NO: 81211 - RNA, 23 nt, Artificial Sequence
  Chemically synthesized
acgguagcuucugcaguuaggag

SEQ ID NO: 81212 - RNA, 23 nt, Artificial Sequence
  Chemically synthesized
ggccauuuccuguuucucugcag

SEQ ID NO: 81213 - RNA, 23 nt, Artificial Sequence
  Chemically synthesized
cggccauuuccuguuucucugca

SEQ ID NO: 81214 - RNA, 23 nt, Artificial Sequence
  Chemically synthesized
gcggccauuuccuguuucucugc

SEQ ID NO: 81215 - RNA, 23 nt, Artificial Sequence
  Chemically synthesized
agcggccauuuccuguuucucug

SEQ ID NO: 81216 - RNA, 23 nt, Artificial Sequence
  Chemically synthesized
gagcggccauuuccuguuucucu

SEQ ID NO: 81217 - RNA, 23 nt, Artificial Sequence
  Chemically synthesized
gaagauuaugacagauuacgccc

SEQ ID NO: 81218 - RNA, 23 nt, Artificial Sequence
  Chemically synthesized
agaagauuaugacagauuacgcc

SEQ ID NO: 81219 - RNA, 23 nt, Artificial Sequence
  Chemically synthesized
aagaagauuaugacagauuacgc

SEQ ID NO: 81220 - RNA, 23 nt, Artificial Sequence
  Chemically synthesized
uuuuuuaaauugacaguugcaga

SEQ ID NO: 81221 - RNA, 23 nt, Artificial Sequence
  Chemically synthesized
cuuaaacuaugaaccuucuuaac

SEQ ID NO: 81222 - RNA, 23 nt, Artificial Sequence
  Chemically synthesized
ucuuaaacuaugaaccuucuuaa

SEQ ID NO: 81223 - RNA, 23 nt, Artificial Sequence
  Chemically synthesized
uucuuaaacuaugaaccuucuua

SEQ ID NO: 81224 - RNA, 23 nt, Artificial Sequence
  Chemically synthesized
auucuuaaacuaugaaccuucuu

SEQ ID NO: 81225 - RNA, 23 nt, Artificial Sequence
  Chemically synthesized
aauucuuaaacuaugaaccuucu

SEQ ID NO: 81226 - RNA, 23 nt, Artificial Sequence
  Chemically synthesized
gguuaauuucugucaaaugcagu

SEQ ID NO: 81227 - RNA, 23 nt, Artificial Sequence
  Chemically synthesized
agguuaauuucugucaaaugcag

SEQ ID NO: 81228 - RNA, 23 nt, Artificial Sequence
  Chemically synthesized
aagguuaauuucugucaaaugca

SEQ ID NO: 81229 - RNA, 23 nt, Artificial Sequence
  Chemically synthesized
aaagguuaauuucugucaaaugc

SEQ ID NO: 81230 - RNA, 23 nt, Artificial Sequence
  Chemically synthesized
aaaagguuaauuucugucaaaug

SEQ ID NO: 81231 - RNA, 23 nt, Artificial Sequence
  Chemically synthesized
gauuuacacuacauuguacaagg

SEQ ID NO: 81232 - RNA, 23 nt, Artificial Sequence
  Chemically synthesized
agauuuacacuacauuguacaag

SEQ ID NO: 81233 - RNA, 23 nt, Artificial Sequence
  Chemically synthesized
gagauuuacacuacauuguacaa

SEQ ID NO: 81234 - RNA, 23 nt, Artificial Sequence
  Chemically synthesized
guuacacaaccaaugcauuuccu

SEQ ID NO: 81235 - RNA, 23 nt, Artificial Sequence
  Chemically synthesized
aguuacacaaccaaugcauuucc

SEQ ID NO: 81236 - RNA, 23 nt, Artificial Sequence
  Chemically synthesized
caguuacacaaccaaugcauuuc

SEQ ID NO: 81237 - RNA, 23 nt, Artificial Sequence
  Chemically synthesized
ucaguuacacaaccaaugcauuu

SEQ ID NO: 81238 - RNA, 23 nt, Artificial Sequence
  Chemically synthesized
aucaguuacacaaccaaugcauu

SEQ ID NO: 81239 - RNA, 23 nt, Artificial Sequence
  Chemically synthesized
uaauggagugagcguagcagcuc

SEQ ID NO: 81240 - RNA, 23 nt, Artificial Sequence
  Chemically synthesized
guaauggagugagcguagcagcu

SEQ ID NO: 81241 - RNA, 23 nt, Artificial Sequence
  Chemically synthesized
uguaauggagugagcguagcagc

SEQ ID NO: 81242 - RNA, 23 nt, Artificial Sequence
  Chemically synthesized
gcuucugcaguuaggaggugcag

SEQ ID NO: 81243 - RNA, 23 nt, Artificial Sequence
  Chemically synthesized
agcuucugcaguuaggaggugca

SEQ ID NO: 81244 - RNA, 23 nt, Artificial Sequence
  Chemically synthesized
uagcuucugcaguuaggaggugc

SEQ ID NO: 81245 - RNA, 23 nt, Artificial Sequence
  Chemically synthesized
aacaccgagcacugaacuuugca

SEQ ID NO: 81246 - RNA, 23 nt, Artificial Sequence
  Chemically synthesized
gaacaccgagcacugaacuuugc

SEQ ID NO: 81247 - RNA, 23 nt, Artificial Sequence
  Chemically synthesized
agaacaccgagcacugaacuuug

SEQ ID NO: 81248 - RNA, 23 nt, Artificial Sequence
  Chemically synthesized
gguuuuuuugucgauuaguaaaa

SEQ ID NO: 81249 - RNA, 23 nt, Artificial Sequence
  Chemically synthesized
agguuuuuuugucgauuaguaaa

SEQ ID NO: 81250 - RNA, 23 nt, Artificial Sequence
  Chemically synthesized
aagguuuuuuugucgauuaguaa

SEQ ID NO: 81251 - RNA, 23 nt, Artificial Sequence
  Chemically synthesized
gcauuagaagguuuuuuugucga

SEQ ID NO: 81252 - RNA, 23 nt, Artificial Sequence
  Chemically synthesized
ugcauuagaagguuuuuuugucg

SEQ ID NO: 81253 - RNA, 23 nt, Artificial Sequence
  Chemically synthesized
augcauuagaagguuuuuuuguc

SEQ ID NO: 81254 - RNA, 23 nt, Artificial Sequence
  Chemically synthesized
aaugcauuagaagguuuuuuugu

SEQ ID NO: 81255 - RNA, 23 nt, Artificial Sequence
  Chemically synthesized
uaaugcauuagaagguuuuuuug

SEQ ID NO: 81256 - RNA, 23 nt, Artificial Sequence
  Chemically synthesized
uaaaacuugccuacugaucaguu

SEQ ID NO: 81257 - RNA, 23 nt, Artificial Sequence
  Chemically synthesized
agaugcguaaagcagaacagccu

SEQ ID NO: 81258 - RNA, 23 nt, Artificial Sequence
  Chemically synthesized
cagaugcguaaagcagaacagcc

SEQ ID NO: 81259 - RNA, 23 nt, Artificial Sequence
  Chemically synthesized
cugggcuuaugggauacagcugg

SEQ ID NO: 81260 - RNA, 23 nt, Artificial Sequence
  Chemically synthesized
ucugggcuuaugggauacagcug

SEQ ID NO: 81261 - RNA, 23 nt, Artificial Sequence
  Chemically synthesized
aucugggcuuaugggauacagcu

SEQ ID NO: 81262 - RNA, 23 nt, Artificial Sequence
  Chemically synthesized
gaauauaucccuacugucuuuga

SEQ ID NO: 81263 - RNA, 23 nt, Artificial Sequence
  Chemically synthesized
agaauauaucccuacugucuuug

SEQ ID NO: 81264 - RNA, 23 nt, Artificial Sequence
  Chemically synthesized
gagaauauaucccuacugucuuu

SEQ ID NO: 81265 - RNA, 23 nt, Artificial Sequence
  Chemically synthesized
ggagaauauaucccuacugucuu

SEQ ID NO: 81266 - RNA, 23 nt, Artificial Sequence
  Chemically synthesized
uggagaauauaucccuacugucu

SEQ ID NO: 81267 - RNA, 23 nt, Artificial Sequence
  Chemically synthesized
cauuuccuggagaauauaucccu

SEQ ID NO: 81268 - RNA, 23 nt, Artificial Sequence
  Chemically synthesized
auguuccuuugggucugugaggu

SEQ ID NO: 81269 - RNA, 23 nt, Artificial Sequence
  Chemically synthesized
gauguuccuuugggucugugagg

SEQ ID NO: 81270 - RNA, 23 nt, Artificial Sequence
  Chemically synthesized
cacuugaccaauacugacccucu

SEQ ID NO: 81271 - RNA, 23 nt, Artificial Sequence
  Chemically synthesized
ggagcggccauuuccuguuucuc

SEQ ID NO: 81272 - RNA, 23 nt, Artificial Sequence
  Chemically synthesized
uggagcggccauuuccuguuucu

SEQ ID NO: 81273 - RNA, 23 nt, Artificial Sequence
  Chemically synthesized
ggaaaaccggugaaucugggcuu

SEQ ID NO: 81274 - RNA, 23 nt, Artificial Sequence
  Chemically synthesized
uggaaaaccggugaaucugggcu

SEQ ID NO: 81275 - RNA, 23 nt, Artificial Sequence
  Chemically synthesized
auggaaaaccggugaaucugggc

SEQ ID NO: 81276 - RNA, 23 nt, Artificial Sequence
  Chemically synthesized
gauggaaaaccggugaaucuggg

SEQ ID NO: 81277 - RNA, 23 nt, Artificial Sequence
  Chemically synthesized
ucacuugaccaauacugacccuc

SEQ ID NO: 81278 - RNA, 23 nt, Artificial Sequence
  Chemically synthesized
gauaaugcauuagaagguuuuuu

SEQ ID NO: 81279 - RNA, 23 nt, Artificial Sequence
  Chemically synthesized
ugauaaugcauuagaagguuuuu

SEQ ID NO: 81280 - RNA, 23 nt, Artificial Sequence
  Chemically synthesized
cugauaaugcauuagaagguuuu

SEQ ID NO: 81281 - RNA, 23 nt, Artificial Sequence
  Chemically synthesized
ucugauaaugcauuagaagguuu

SEQ ID NO: 81282 - RNA, 23 nt, Artificial Sequence
  Chemically synthesized
uucugauaaugcauuagaagguu

SEQ ID NO: 81283 - RNA, 23 nt, Artificial Sequence
  Chemically synthesized
aaacugguuguucuguuagucgc

SEQ ID NO: 81284 - RNA, 23 nt, Artificial Sequence
  Chemically synthesized
uaaacugguuguucuguuagucg

SEQ ID NO: 81285 - RNA, 23 nt, Artificial Sequence
  Chemically synthesized
uuaaacugguuguucuguuaguc

SEQ ID NO: 81286 - RNA, 23 nt, Artificial Sequence
  Chemically synthesized
uuuaaacugguuguucuguuagu

SEQ ID NO: 81287 - RNA, 23 nt, Artificial Sequence
  Chemically synthesized
cuuuaaacugguuguucuguuag

SEQ ID NO: 81288 - RNA, 23 nt, Artificial Sequence
  Chemically synthesized
ucuuuaaacugguuguucuguua

SEQ ID NO: 81289 - RNA, 23 nt, Artificial Sequence
  Chemically synthesized
acauaacauuguacuguaaugga

SEQ ID NO: 81290 - RNA, 23 nt, Artificial Sequence
  Chemically synthesized
aaauaccuucugaacuacacugc

SEQ ID NO: 81291 - RNA, 23 nt, Artificial Sequence
  Chemically synthesized
aaaauaccuucugaacuacacug

SEQ ID NO: 81292 - RNA, 23 nt, Artificial Sequence
  Chemically synthesized
cauucuuguucagauuaagaguu

SEQ ID NO: 81293 - RNA, 23 nt, Artificial Sequence
  Chemically synthesized
ucaaugccaacuuuuuguuacag

SEQ ID NO: 81294 - RNA, 23 nt, Artificial Sequence
  Chemically synthesized
cucaaugccaacuuuuuguuaca

SEQ ID NO: 81295 - RNA, 23 nt, Artificial Sequence
  Chemically synthesized
acucaaugccaacuuuuuguuac

SEQ ID NO: 81296 - RNA, 23 nt, Artificial Sequence
  Chemically synthesized
gcgaggccucaagacaguguuug

SEQ ID NO: 81297 - RNA, 23 nt, Artificial Sequence
  Chemically synthesized
agcgaggccucaagacaguguuu

SEQ ID NO: 81298 - RNA, 23 nt, Artificial Sequence
  Chemically synthesized
cagcgaggccucaagacaguguu

SEQ ID NO: 81299 - RNA, 23 nt, Artificial Sequence
  Chemically synthesized
auuaccgacacugucacuugacc

SEQ ID NO: 81300 - RNA, 23 nt, Artificial Sequence
  Chemically synthesized
gauuaccgacacugucacuugac

SEQ ID NO: 81301 - RNA, 23 nt, Artificial Sequence
  Chemically synthesized
gcuuuccauguuacuuuauucag

SEQ ID NO: 81302 - RNA, 23 nt, Artificial Sequence
  Chemically synthesized
gcuaacuuaguaagugcuuuucu

SEQ ID NO: 81303 - RNA, 23 nt, Artificial Sequence
  Chemically synthesized
cgcuaacuuaguaagugcuuuuc

SEQ ID NO: 81304 - RNA, 23 nt, Artificial Sequence
  Chemically synthesized
ucgcuaacuuaguaagugcuuuu

SEQ ID NO: 81305 - RNA, 23 nt, Artificial Sequence
  Chemically synthesized
gucgcuaacuuaguaagugcuuu

SEQ ID NO: 81306 - RNA, 23 nt, Artificial Sequence
  Chemically synthesized
guuaggaggugcagacacuugcu

SEQ ID NO: 81307 - RNA, 23 nt, Artificial Sequence
  Chemically synthesized
aguuaggaggugcagacacuugc

SEQ ID NO: 81308 - RNA, 23 nt, Artificial Sequence
  Chemically synthesized
cccccccauucuuguucagauua

SEQ ID NO: 81309 - RNA, 23 nt, Artificial Sequence
  Chemically synthesized
gaaacugaaggagaagaagcuga

SEQ ID NO: 81310 - RNA, 23 nt, Artificial Sequence
  Chemically synthesized
gaaaauguccgugcaaaguggua

SEQ ID NO: 81311 - RNA, 23 nt, Artificial Sequence
  Chemically synthesized
gauguguucuuaauuugcuuuuc

SEQ ID NO: 81312 - RNA, 23 nt, Artificial Sequence
  Chemically synthesized
agauguguucuuaauuugcuuuu

SEQ ID NO: 81313 - RNA, 23 nt, Artificial Sequence
  Chemically synthesized
cagauguguucuuaauuugcuuu

SEQ ID NO: 81314 - RNA, 23 nt, Artificial Sequence
  Chemically synthesized
acagauguguucuuaauuugcuu

SEQ ID NO: 81315 - RNA, 23 nt, Artificial Sequence
  Chemically synthesized
aacagauguguucuuaauuugcu

SEQ ID NO: 81316 - RNA, 23 nt, Artificial Sequence
  Chemically synthesized
uuaugguagauggaaaaccggug

SEQ ID NO: 81317 - RNA, 23 nt, Artificial Sequence
  Chemically synthesized
acaaccaaugcauuuccuggaga

SEQ ID NO: 81318 - RNA, 23 nt, Artificial Sequence
  Chemically synthesized
agcuguagguaaaacuugccuac

SEQ ID NO: 81319 - RNA, 23 nt, Artificial Sequence
  Chemically synthesized
gagcuguagguaaaacuugccua

SEQ ID NO: 81320 - RNA, 23 nt, Artificial Sequence
  Chemically synthesized
agagcuguagguaaaacuugccu

SEQ ID NO: 81321 - RNA, 23 nt, Artificial Sequence
  Chemically synthesized
uagagcuguagguaaaacuugcc

SEQ ID NO: 81322 - RNA, 23 nt, Artificial Sequence
  Chemically synthesized
auagagcuguagguaaaacuugc

SEQ ID NO: 81323 - RNA, 23 nt, Artificial Sequence
  Chemically synthesized
agauuuugaacagaacugcuauu

SEQ ID NO: 81324 - RNA, 23 nt, Artificial Sequence
  Chemically synthesized
uaguucucagaugcguaaagcag

SEQ ID NO: 81325 - RNA, 23 nt, Artificial Sequence
  Chemically synthesized
gagaagacgguagcuucugcagu

SEQ ID NO: 81326 - RNA, 23 nt, Artificial Sequence
  Chemically synthesized
ugagaagacgguagcuucugcag

SEQ ID NO: 81327 - RNA, 23 nt, Artificial Sequence
  Chemically synthesized
uugagaagacgguagcuucugca

SEQ ID NO: 81328 - RNA, 23 nt, Artificial Sequence
  Chemically synthesized
caaagugguauccugaggugcgg

SEQ ID NO: 81329 - RNA, 23 nt, Artificial Sequence
  Chemically synthesized
gcaaagugguauccugaggugcg

SEQ ID NO: 81330 - RNA, 23 nt, Artificial Sequence
  Chemically synthesized
ugcaaagugguauccugaggugc

SEQ ID NO: 81331 - RNA, 23 nt, Artificial Sequence
  Chemically synthesized
auguccgugcaaagugguauccu

SEQ ID NO: 81332 - RNA, 23 nt, Artificial Sequence
  Chemically synthesized
aauguccgugcaaagugguaucc

SEQ ID NO: 81333 - RNA, 23 nt, Artificial Sequence
  Chemically synthesized
aaauguccgugcaaagugguauc

SEQ ID NO: 81334 - RNA, 23 nt, Artificial Sequence
  Chemically synthesized
aaaauguccgugcaaagugguau

SEQ ID NO: 81335 - RNA, 23 nt, Artificial Sequence
  Chemically synthesized
auuugcuuuucccuugugagucc

SEQ ID NO: 81336 - RNA, 23 nt, Artificial Sequence
  Chemically synthesized
aauuugcuuuucccuugugaguc

SEQ ID NO: 81337 - RNA, 23 nt, Artificial Sequence
  Chemically synthesized
guaagugcuuuucuuauagaacc

SEQ ID NO: 81338 - RNA, 23 nt, Artificial Sequence
  Chemically synthesized
aguaagugcuuuucuuauagaac

SEQ ID NO: 81339 - RNA, 23 nt, Artificial Sequence
  Chemically synthesized
uaguaagugcuuuucuuauagaa

SEQ ID NO: 81340 - RNA, 23 nt, Artificial Sequence
  Chemically synthesized
uuaguaagugcuuuucuuauaga

SEQ ID NO: 81341 - RNA, 23 nt, Artificial Sequence
  Chemically synthesized
cuuucucuuacaccugccaugcc

SEQ ID NO: 81342 - RNA, 23 nt, Artificial Sequence
  Chemically synthesized
ccuuucucuuacaccugccaugc

SEQ ID NO: 81343 - RNA, 23 nt, Artificial Sequence
  Chemically synthesized
uccuuucucuuacaccugccaug

SEQ ID NO: 81344 - RNA, 23 nt, Artificial Sequence
  Chemically synthesized
uuccuuucucuuacaccugccau

SEQ ID NO: 81345 - RNA, 23 nt, Artificial Sequence
  Chemically synthesized
uuuccuuucucuuacaccugcca

SEQ ID NO: 81346 - RNA, 23 nt, Artificial Sequence
  Chemically synthesized
guggagcggccauuuccuguuuc

SEQ ID NO: 81347 - RNA, 23 nt, Artificial Sequence
  Chemically synthesized
aguggagcggccauuuccuguuu

SEQ ID NO: 81348 - RNA, 23 nt, Artificial Sequence
  Chemically synthesized
gcguaaagcagaacagccucccg

SEQ ID NO: 81349 - RNA, 23 nt, Artificial Sequence
  Chemically synthesized
ugcguaaagcagaacagccuccc

SEQ ID NO: 81350 - RNA, 23 nt, Artificial Sequence
  Chemically synthesized
augcguaaagcagaacagccucc

SEQ ID NO: 81351 - RNA, 23 nt, Artificial Sequence
  Chemically synthesized
gaugcguaaagcagaacagccuc

SEQ ID NO: 81352 - RNA, 23 nt, Artificial Sequence
  Chemically synthesized
gccauuuccuguuucucugcagu

SEQ ID NO: 81353 - RNA, 23 nt, Artificial Sequence
  Chemically synthesized
gcaguuuuccucagcuuugggug

SEQ ID NO: 81354 - RNA, 23 nt, Artificial Sequence
  Chemically synthesized
ugcaguuuuccucagcuuugggu

SEQ ID NO: 81355 - RNA, 23 nt, Artificial Sequence
  Chemically synthesized
cugcaguuuuccucagcuuuggg

SEQ ID NO: 81356 - RNA, 23 nt, Artificial Sequence
  Chemically synthesized
ucugcaguuuuccucagcuuugg

SEQ ID NO: 81357 - RNA, 23 nt, Artificial Sequence
  Chemically synthesized
cucugcaguuuuccucagcuuug

SEQ ID NO: 81358 - RNA, 23 nt, Artificial Sequence
  Chemically synthesized
uaucccuacugucuuugacaauu

SEQ ID NO: 81359 - RNA, 23 nt, Artificial Sequence
  Chemically synthesized
auaucccuacugucuuugacaau

SEQ ID NO: 81360 - RNA, 23 nt, Artificial Sequence
  Chemically synthesized
uauaucccuacugucuuugacaa

SEQ ID NO: 81361 - RNA, 23 nt, Artificial Sequence
  Chemically synthesized
cacugucuugccagauuaccgac

SEQ ID NO: 81362 - RNA, 23 nt, Artificial Sequence
  Chemically synthesized
agucgcuaacuuaguaagugcuu

SEQ ID NO: 81363 - RNA, 23 nt, Artificial Sequence
  Chemically synthesized
uaaauguaagaguucagacucac

SEQ ID NO: 81364 - RNA, 23 nt, Artificial Sequence
  Chemically synthesized
guuugacgaagcgauccgagcag

SEQ ID NO: 81365 - RNA, 23 nt, Artificial Sequence
  Chemically synthesized
uguuugacgaagcgauccgagca

SEQ ID NO: 81366 - RNA, 23 nt, Artificial Sequence
  Chemically synthesized
guguuugacgaagcgauccgagc

SEQ ID NO: 81367 - RNA, 23 nt, Artificial Sequence
  Chemically synthesized
aguguuugacgaagcgauccgag

SEQ ID NO: 81368 - RNA, 23 nt, Artificial Sequence
  Chemically synthesized
cuggagaauauaucccuacuguc

SEQ ID NO: 81369 - RNA, 23 nt, Artificial Sequence
  Chemically synthesized
uacugacccucuuuaccucgccc

SEQ ID NO: 81370 - RNA, 23 nt, Artificial Sequence
  Chemically synthesized
auacugacccucuuuaccucgcc

SEQ ID NO: 81371 - RNA, 23 nt, Artificial Sequence
  Chemically synthesized
aauacugacccucuuuaccucgc

SEQ ID NO: 81372 - RNA, 23 nt, Artificial Sequence
  Chemically synthesized
cgagguaaagagggucaguauug

SEQ ID NO: 81373 - RNA, 23 nt, Artificial Sequence
  Chemically synthesized
ccuucaguuucucgaucgugucu

SEQ ID NO: 81374 - RNA, 23 nt, Artificial Sequence
  Chemically synthesized
cuucaguuucucgaucgugucuu

SEQ ID NO: 81375 - RNA, 23 nt, Artificial Sequence
  Chemically synthesized
uucaguuucucgaucgugucuuu

SEQ ID NO: 81376 - RNA, 23 nt, Artificial Sequence
  Chemically synthesized
uuucucuuccucuucuucacggg

SEQ ID NO: 81377 - RNA, 23 nt, Artificial Sequence
  Chemically synthesized
aaucuucuuguccagcuguaucc

SEQ ID NO: 81378 - RNA, 23 nt, Artificial Sequence
  Chemically synthesized
aucuucuuguccagcuguauccc

SEQ ID NO: 81379 - RNA, 23 nt, Artificial Sequence
  Chemically synthesized
ucuucuuguccagcuguauccca

SEQ ID NO: 81380 - RNA, 23 nt, Artificial Sequence
  Chemically synthesized
cuucuuguccagcuguaucccau

SEQ ID NO: 81381 - RNA, 23 nt, Artificial Sequence
  Chemically synthesized
uucuuguccagcuguaucccaua

SEQ ID NO: 81382 - RNA, 23 nt, Artificial Sequence
  Chemically synthesized
uagcucugaauaaaguaacaugg

SEQ ID NO: 81383 - RNA, 23 nt, Artificial Sequence
  Chemically synthesized
agcucugaauaaaguaacaugga

SEQ ID NO: 81384 - RNA, 23 nt, Artificial Sequence
  Chemically synthesized
gcucugaauaaaguaacauggaa

SEQ ID NO: 81385 - RNA, 23 nt, Artificial Sequence
  Chemically synthesized
cucugaauaaaguaacauggaaa

SEQ ID NO: 81386 - RNA, 23 nt, Artificial Sequence
  Chemically synthesized
ucugaauaaaguaacauggaaag

SEQ ID NO: 81387 - RNA, 23 nt, Artificial Sequence
  Chemically synthesized
cauuuacaacagcaggcauuuuc

SEQ ID NO: 81388 - RNA, 23 nt, Artificial Sequence
  Chemically synthesized
auuuacaacagcaggcauuuucu

SEQ ID NO: 81389 - RNA, 23 nt, Artificial Sequence
  Chemically synthesized
uuuacaacagcaggcauuuucuc

SEQ ID NO: 81390 - RNA, 23 nt, Artificial Sequence
  Chemically synthesized
uauauucuccaggaaaugcauug

SEQ ID NO: 81391 - RNA, 23 nt, Artificial Sequence
  Chemically synthesized
auauucuccaggaaaugcauugg

SEQ ID NO: 81392 - RNA, 23 nt, Artificial Sequence
  Chemically synthesized
uauucuccaggaaaugcauuggu

SEQ ID NO: 81393 - RNA, 23 nt, Artificial Sequence
  Chemically synthesized
auucuccaggaaaugcauugguu

SEQ ID NO: 81394 - RNA, 23 nt, Artificial Sequence
  Chemically synthesized
uucuccaggaaaugcauugguug

SEQ ID NO: 81395 - RNA, 23 nt, Artificial Sequence
  Chemically synthesized
accuuuuagaguuuuuacccgug

SEQ ID NO: 81396 - RNA, 23 nt, Artificial Sequence
  Chemically synthesized
ccuuuuagaguuuuuacccguga

SEQ ID NO: 81397 - RNA, 23 nt, Artificial Sequence
  Chemically synthesized
cuuuuagaguuuuuacccgugac

SEQ ID NO: 81398 - RNA, 23 nt, Artificial Sequence
  Chemically synthesized
uuuuagaguuuuuacccgugaca

SEQ ID NO: 81399 - RNA, 23 nt, Artificial Sequence
  Chemically synthesized
uuuagaguuuuuacccgugacac

SEQ ID NO: 81400 - RNA, 23 nt, Artificial Sequence
  Chemically synthesized
guuuuccaucuaccauaacauug

SEQ ID NO: 81401 - RNA, 23 nt, Artificial Sequence
  Chemically synthesized
uuuuccaucuaccauaacauugg

SEQ ID NO: 81402 - RNA, 23 nt, Artificial Sequence
  Chemically synthesized
uuuccaucuaccauaacauuggc

SEQ ID NO: 81403 - RNA, 23 nt, Artificial Sequence
  Chemically synthesized
uuccaucuaccauaacauuggca

SEQ ID NO: 81404 - RNA, 23 nt, Artificial Sequence
  Chemically synthesized
uccaucuaccauaacauuggcag

SEQ ID NO: 81405 - RNA, 23 nt, Artificial Sequence
  Chemically synthesized
aaucugucauaaucuucuugucc

SEQ ID NO: 81406 - RNA, 23 nt, Artificial Sequence
  Chemically synthesized
aucugucauaaucuucuugucca

SEQ ID NO: 81407 - RNA, 23 nt, Artificial Sequence
  Chemically synthesized
ucugucauaaucuucuuguccag

SEQ ID NO: 81408 - RNA, 23 nt, Artificial Sequence
  Chemically synthesized
cugucauaaucuucuuguccagc

SEQ ID NO: 81409 - RNA, 23 nt, Artificial Sequence
  Chemically synthesized
ugucauaaucuucuuguccagcu

SEQ ID NO: 81410 - RNA, 23 nt, Artificial Sequence
  Chemically synthesized
acaguagggauauauucuccagg

SEQ ID NO: 81411 - RNA, 23 nt, Artificial Sequence
  Chemically synthesized
caguagggauauauucuccagga

SEQ ID NO: 81412 - RNA, 23 nt, Artificial Sequence
  Chemically synthesized
aguagggauauauucuccaggaa

SEQ ID NO: 81413 - RNA, 23 nt, Artificial Sequence
  Chemically synthesized
guagggauauauucuccaggaaa

SEQ ID NO: 81414 - RNA, 23 nt, Artificial Sequence
  Chemically synthesized
uagggauauauucuccaggaaau

SEQ ID NO: 81415 - RNA, 23 nt, Artificial Sequence
  Chemically synthesized
ccgguuuuccaucuaccauaaca

SEQ ID NO: 81416 - RNA, 23 nt, Artificial Sequence
  Chemically synthesized
cgguuuuccaucuaccauaacau

SEQ ID NO: 81417 - RNA, 23 nt, Artificial Sequence
  Chemically synthesized
gguuuuccaucuaccauaacauu

SEQ ID NO: 81418 - RNA, 23 nt, Artificial Sequence
  Chemically synthesized
gaguuuuuacccgugacacuuuc

SEQ ID NO: 81419 - RNA, 23 nt, Artificial Sequence
  Chemically synthesized
aguuuuuacccgugacacuuuca

SEQ ID NO: 81420 - RNA, 23 nt, Artificial Sequence
  Chemically synthesized
guuuuuacccgugacacuuucau

SEQ ID NO: 81421 - RNA, 23 nt, Artificial Sequence
  Chemically synthesized
uuuuuacccgugacacuuucauu

SEQ ID NO: 81422 - RNA, 23 nt, Artificial Sequence
  Chemically synthesized
uuuuacccgugacacuuucauuc

SEQ ID NO: 81423 - RNA, 23 nt, Artificial Sequence
  Chemically synthesized
uugcaaaguucagugcucggugu

SEQ ID NO: 81424 - RNA, 23 nt, Artificial Sequence
  Chemically synthesized
guaaucugucauaaucuucuugu

SEQ ID NO: 81425 - RNA, 23 nt, Artificial Sequence
  Chemically synthesized
uaaucugucauaaucuucuuguc

SEQ ID NO: 81426 - RNA, 23 nt, Artificial Sequence
  Chemically synthesized
aaccuuuuagaguuuuuacccgu

SEQ ID NO: 81427 - RNA, 23 nt, Artificial Sequence
  Chemically synthesized
acucuuaaucugaacaagaaugg

SEQ ID NO: 81428 - RNA, 23 nt, Artificial Sequence
  Chemically synthesized
cucuuaaucugaacaagaauggg

SEQ ID NO: 81429 - RNA, 23 nt, Artificial Sequence
  Chemically synthesized
ucuuaaucugaacaagaaugggg

SEQ ID NO: 81430 - RNA, 23 nt, Artificial Sequence
  Chemically synthesized
cuuaaucugaacaagaauggggg

SEQ ID NO: 81431 - RNA, 23 nt, Artificial Sequence
  Chemically synthesized
uuaaucugaacaagaaugggggg

SEQ ID NO: 81432 - RNA, 23 nt, Artificial Sequence
  Chemically synthesized
auuuugucaaaauacugucuuug

SEQ ID NO: 81433 - RNA, 23 nt, Artificial Sequence
  Chemically synthesized
uuuugucaaaauacugucuuugu

SEQ ID NO: 81434 - RNA, 23 nt, Artificial Sequence
  Chemically synthesized
uuugucaaaauacugucuuuguc

SEQ ID NO: 81435 - RNA, 23 nt, Artificial Sequence
  Chemically synthesized
uugucaaaauacugucuuugucc

SEQ ID NO: 81436 - RNA, 23 nt, Artificial Sequence
  Chemically synthesized
ugucaaaauacugucuuuguccu

SEQ ID NO: 81437 - RNA, 23 nt, Artificial Sequence
  Chemically synthesized
aaaguucagugcucgguguucuc

SEQ ID NO: 81438 - RNA, 23 nt, Artificial Sequence
  Chemically synthesized
aaguucagugcucgguguucucg

SEQ ID NO: 81439 - RNA, 23 nt, Artificial Sequence
  Chemically synthesized
aguucagugcucgguguucucgg

SEQ ID NO: 81440 - RNA, 23 nt, Artificial Sequence
  Chemically synthesized
guucagugcucgguguucucggc

SEQ ID NO: 81441 - RNA, 23 nt, Artificial Sequence
  Chemically synthesized
uucagugcucgguguucucggca

SEQ ID NO: 81442 - RNA, 23 nt, Artificial Sequence
  Chemically synthesized
ugauguuaagaagguucauaguu

SEQ ID NO: 81443 - RNA, 23 nt, Artificial Sequence
  Chemically synthesized
gauguuaagaagguucauaguuu

SEQ ID NO: 81444 - RNA, 23 nt, Artificial Sequence
  Chemically synthesized
auguuaagaagguucauaguuua

SEQ ID NO: 81445 - RNA, 23 nt, Artificial Sequence
  Chemically synthesized
auacugucuuuguccuuugauca

SEQ ID NO: 81446 - RNA, 23 nt, Artificial Sequence
  Chemically synthesized
uacugucuuuguccuuugaucac

SEQ ID NO: 81447 - RNA, 23 nt, Artificial Sequence
  Chemically synthesized
acugucuuuguccuuugaucaca

SEQ ID NO: 81448 - RNA, 23 nt, Artificial Sequence
  Chemically synthesized
cugucuuuguccuuugaucacac

SEQ ID NO: 81449 - RNA, 23 nt, Artificial Sequence
  Chemically synthesized
ugcaguguaguucagaagguauu

SEQ ID NO: 81450 - RNA, 23 nt, Artificial Sequence
  Chemically synthesized
aguuucucgaucgugucuuuauc

SEQ ID NO: 81451 - RNA, 23 nt, Artificial Sequence
  Chemically synthesized
guuucucgaucgugucuuuauca

SEQ ID NO: 81452 - RNA, 23 nt, Artificial Sequence
  Chemically synthesized
uuucucgaucgugucuuuaucau

SEQ ID NO: 81453 - RNA, 23 nt, Artificial Sequence
  Chemically synthesized
uucucgaucgugucuuuaucauc

SEQ ID NO: 81454 - RNA, 23 nt, Artificial Sequence
  Chemically synthesized
ucucgaucgugucuuuaucaucc

SEQ ID NO: 81455 - RNA, 23 nt, Artificial Sequence
  Chemically synthesized
gggauauauucuccaggaaaugc

SEQ ID NO: 81456 - RNA, 23 nt, Artificial Sequence
  Chemically synthesized
ggauauauucuccaggaaaugca

SEQ ID NO: 81457 - RNA, 23 nt, Artificial Sequence
  Chemically synthesized
gauauauucuccaggaaaugcau

SEQ ID NO: 81458 - RNA, 23 nt, Artificial Sequence
  Chemically synthesized
auauauucuccaggaaaugcauu

SEQ ID NO: 81459 - RNA, 23 nt, Artificial Sequence
  Chemically synthesized
ucgguguucucggcacaacaaug

SEQ ID NO: 81460 - RNA, 23 nt, Artificial Sequence
  Chemically synthesized
ucugcuuuacgcaucugagaacu

SEQ ID NO: 81461 - RNA, 23 nt, Artificial Sequence
  Chemically synthesized
caccucaggauaccacuuugcac

SEQ ID NO: 81462 - RNA, 23 nt, Artificial Sequence
  Chemically synthesized
accucaggauaccacuuugcacg

SEQ ID NO: 81463 - RNA, 23 nt, Artificial Sequence
  Chemically synthesized
ccucaggauaccacuuugcacgg

SEQ ID NO: 81464 - RNA, 23 nt, Artificial Sequence
  Chemically synthesized
cucaggauaccacuuugcacgga

SEQ ID NO: 81465 - RNA, 23 nt, Artificial Sequence
  Chemically synthesized
ucaggauaccacuuugcacggac

SEQ ID NO: 81466 - RNA, 23 nt, Artificial Sequence
  Chemically synthesized
aaacuauaaagcugcaacacaug

SEQ ID NO: 81467 - RNA, 23 nt, Artificial Sequence
  Chemically synthesized
aguguaaaucuccacuucguauu

SEQ ID NO: 81468 - RNA, 23 nt, Artificial Sequence
  Chemically synthesized
guguaaaucuccacuucguauuu

SEQ ID NO: 81469 - RNA, 23 nt, Artificial Sequence
  Chemically synthesized
uguaaaucuccacuucguauuuu

SEQ ID NO: 81470 - RNA, 23 nt, Artificial Sequence
  Chemically synthesized
guaaaucuccacuucguauuuug

SEQ ID NO: 81471 - RNA, 23 nt, Artificial Sequence
  Chemically synthesized
uaaaucuccacuucguauuuugu

SEQ ID NO: 81472 - RNA, 23 nt, Artificial Sequence
  Chemically synthesized
acucgcuaugaaaucacaaagac

SEQ ID NO: 81473 - RNA, 23 nt, Artificial Sequence
  Chemically synthesized
cucgcuaugaaaucacaaagacu

SEQ ID NO: 81474 - RNA, 23 nt, Artificial Sequence
  Chemically synthesized
gagcacuccagguauuuuacagc

SEQ ID NO: 81475 - RNA, 23 nt, Artificial Sequence
  Chemically synthesized
auuaaccuuuuagaguuuuuacc

SEQ ID NO: 81476 - RNA, 23 nt, Artificial Sequence
  Chemically synthesized
uuaaccuuuuagaguuuuuaccc

SEQ ID NO: 81477 - RNA, 23 nt, Artificial Sequence
  Chemically synthesized
uaaccuuuuagaguuuuuacccg

SEQ ID NO: 81478 - RNA, 23 nt, Artificial Sequence
  Chemically synthesized
ucaguuucucgaucgugucuuua

SEQ ID NO: 81479 - RNA, 23 nt, Artificial Sequence
  Chemically synthesized
caguuucucgaucgugucuuuau

SEQ ID NO: 81480 - RNA, 23 nt, Artificial Sequence
  Chemically synthesized
aacuaaggaaagcacuuauuagc

SEQ ID NO: 81481 - RNA, 23 nt, Artificial Sequence
  Chemically synthesized
acuaaggaaagcacuuauuagcu

SEQ ID NO: 81482 - RNA, 23 nt, Artificial Sequence
  Chemically synthesized
cuaaggaaagcacuuauuagcuc

SEQ ID NO: 81483 - RNA, 23 nt, Artificial Sequence
  Chemically synthesized
uaaggaaagcacuuauuagcucu

SEQ ID NO: 81484 - RNA, 23 nt, Artificial Sequence
  Chemically synthesized
aaggaaagcacuuauuagcucug

SEQ ID NO: 81485 - RNA, 23 nt, Artificial Sequence
  Chemically synthesized
ugaauaaaguaacauggaaagca

SEQ ID NO: 81486 - RNA, 23 nt, Artificial Sequence
  Chemically synthesized
gaauaaaguaacauggaaagcac

SEQ ID NO: 81487 - RNA, 23 nt, Artificial Sequence
  Chemically synthesized
aauaaaguaacauggaaagcacu

SEQ ID NO: 81488 - RNA, 23 nt, Artificial Sequence
  Chemically synthesized
auaaaguaacauggaaagcacuu

SEQ ID NO: 81489 - RNA, 23 nt, Artificial Sequence
  Chemically synthesized
uaaaguaacauggaaagcacuuu

SEQ ID NO: 81490 - RNA, 23 nt, Artificial Sequence
  Chemically synthesized
uuagaguuuuuacccgugacacu

SEQ ID NO: 81491 - RNA, 23 nt, Artificial Sequence
  Chemically synthesized
uuuacccgugacacuuucauucc

SEQ ID NO: 81492 - RNA, 23 nt, Artificial Sequence
  Chemically synthesized
uuacccgugacacuuucauuccu

SEQ ID NO: 81493 - RNA, 23 nt, Artificial Sequence
  Chemically synthesized
uacccgugacacuuucauuccuu

SEQ ID NO: 81494 - RNA, 23 nt, Artificial Sequence
  Chemically synthesized
cgucaaacacugucuugaggccu

SEQ ID NO: 81495 - RNA, 23 nt, Artificial Sequence
  Chemically synthesized
gucaaacacugucuugaggccuc

SEQ ID NO: 81496 - RNA, 23 nt, Artificial Sequence
  Chemically synthesized
ucaaacacugucuugaggccucg

SEQ ID NO: 81497 - RNA, 23 nt, Artificial Sequence
  Chemically synthesized
caggauaccacuuugcacggaca

SEQ ID NO: 81498 - RNA, 23 nt, Artificial Sequence
  Chemically synthesized
gucauaaucuucuuguccagcug

SEQ ID NO: 81499 - RNA, 23 nt, Artificial Sequence
  Chemically synthesized
ucauaaucuucuuguccagcugu

SEQ ID NO: 81500 - RNA, 23 nt, Artificial Sequence
  Chemically synthesized
cauaaucuucuuguccagcugua

SEQ ID NO: 81501 - RNA, 23 nt, Artificial Sequence
  Chemically synthesized
auaaucuucuuguccagcuguau

SEQ ID NO: 81502 - RNA, 23 nt, Artificial Sequence
  Chemically synthesized
uaacauggaaagcacuuuuacua

SEQ ID NO: 81503 - RNA, 23 nt, Artificial Sequence
  Chemically synthesized
aacauggaaagcacuuuuacuaa

SEQ ID NO: 81504 - RNA, 23 nt, Artificial Sequence
  Chemically synthesized
acauggaaagcacuuuuacuaau

SEQ ID NO: 81505 - RNA, 23 nt, Artificial Sequence
  Chemically synthesized
cauggaaagcacuuuuacuaauc

SEQ ID NO: 81506 - RNA, 23 nt, Artificial Sequence
  Chemically synthesized
agaguuuuuacccgugacacuuu

SEQ ID NO: 81507 - RNA, 23 nt, Artificial Sequence
  Chemically synthesized
acgcuucauucgggaggcuguuc

SEQ ID NO: 81508 - RNA, 23 nt, Artificial Sequence
  Chemically synthesized
cgcuucauucgggaggcuguucu

SEQ ID NO: 81509 - RNA, 23 nt, Artificial Sequence
  Chemically synthesized
gcuucauucgggaggcuguucug

SEQ ID NO: 81510 - RNA, 23 nt, Artificial Sequence
  Chemically synthesized
cuucauucgggaggcuguucugc

SEQ ID NO: 81511 - RNA, 23 nt, Artificial Sequence
  Chemically synthesized
uucauucgggaggcuguucugcu

SEQ ID NO: 81512 - RNA, 23 nt, Artificial Sequence
  Chemically synthesized
ugugagucugaacucuuacauuu

SEQ ID NO: 81513 - RNA, 23 nt, Artificial Sequence
  Chemically synthesized
uucucuuccucuucuucacggga

SEQ ID NO: 81514 - RNA, 23 nt, Artificial Sequence
  Chemically synthesized
ucucuuccucuucuucacgggag

SEQ ID NO: 81515 - RNA, 23 nt, Artificial Sequence
  Chemically synthesized
cuguaucccauaagcccagauuc

SEQ ID NO: 81516 - RNA, 23 nt, Artificial Sequence
  Chemically synthesized
uguaucccauaagcccagauuca

SEQ ID NO: 81517 - RNA, 23 nt, Artificial Sequence
  Chemically synthesized
guaucccauaagcccagauucac

SEQ ID NO: 81518 - RNA, 23 nt, Artificial Sequence
  Chemically synthesized
uaucccauaagcccagauucacc

SEQ ID NO: 81519 - RNA, 23 nt, Artificial Sequence
  Chemically synthesized
aucccauaagcccagauucaccg

SEQ ID NO: 81520 - RNA, 23 nt, Artificial Sequence
  Chemically synthesized
uuauuagcucugaauaaaguaac

SEQ ID NO: 81521 - RNA, 23 nt, Artificial Sequence
  Chemically synthesized
uauuagcucugaauaaaguaaca

SEQ ID NO: 81522 - RNA, 23 nt, Artificial Sequence
  Chemically synthesized
auuagcucugaauaaaguaacau

SEQ ID NO: 81523 - RNA, 23 nt, Artificial Sequence
  Chemically synthesized
uuagcucugaauaaaguaacaug

SEQ ID NO: 81524 - RNA, 23 nt, Artificial Sequence
  Chemically synthesized
aaaguaacauggaaagcacuuuu

SEQ ID NO: 81525 - RNA, 23 nt, Artificial Sequence
  Chemically synthesized
aaguaacauggaaagcacuuuua

SEQ ID NO: 81526 - RNA, 23 nt, Artificial Sequence
  Chemically synthesized
aguaacauggaaagcacuuuuac

SEQ ID NO: 81527 - RNA, 23 nt, Artificial Sequence
  Chemically synthesized
guaacauggaaagcacuuuuacu

SEQ ID NO: 81528 - RNA, 23 nt, Artificial Sequence
  Chemically synthesized
gucaaaauacugucuuuguccuu

SEQ ID NO: 81529 - RNA, 23 nt, Artificial Sequence
  Chemically synthesized
ucaaaauacugucuuuguccuuu

SEQ ID NO: 81530 - RNA, 23 nt, Artificial Sequence
  Chemically synthesized
caaaauacugucuuuguccuuug

SEQ ID NO: 81531 - RNA, 23 nt, Artificial Sequence
  Chemically synthesized
aaaauacugucuuuguccuuuga

SEQ ID NO: 81532 - RNA, 23 nt, Artificial Sequence
  Chemically synthesized
aaauacugucuuuguccuuugau

SEQ ID NO: 81533 - RNA, 23 nt, Artificial Sequence
  Chemically synthesized
aauacugucuuuguccuuugauc

SEQ ID NO: 81534 - RNA, 23 nt, Artificial Sequence
  Chemically synthesized
auuaaucuguaacaaaaaguugg

SEQ ID NO: 81535 - RNA, 23 nt, Artificial Sequence
  Chemically synthesized
uuaaucuguaacaaaaaguuggc

SEQ ID NO: 81536 - RNA, 23 nt, Artificial Sequence
  Chemically synthesized
uaaucuguaacaaaaaguuggca

SEQ ID NO: 81537 - RNA, 23 nt, Artificial Sequence
  Chemically synthesized
aaucuguaacaaaaaguuggcau

SEQ ID NO: 81538 - RNA, 23 nt, Artificial Sequence
  Chemically synthesized
aucuguaacaaaaaguuggcauu

SEQ ID NO: 81539 - RNA, 23 nt, Artificial Sequence
  Chemically synthesized
uaacaaaaaguuggcauugagug

SEQ ID NO: 81540 - RNA, 23 nt, Artificial Sequence
  Chemically synthesized
aacaaaaaguuggcauugagugc

SEQ ID NO: 81541 - RNA, 23 nt, Artificial Sequence
  Chemically synthesized
cuauaagaaaagcacuuacuaag

SEQ ID NO: 81542 - RNA, 23 nt, Artificial Sequence
  Chemically synthesized
uauaagaaaagcacuuacuaagu

SEQ ID NO: 81543 - RNA, 23 nt, Artificial Sequence
  Chemically synthesized
auaagaaaagcacuuacuaaguu

SEQ ID NO: 81544 - RNA, 23 nt, Artificial Sequence
  Chemically synthesized
uaagaaaagcacuuacuaaguua

SEQ ID NO: 81545 - RNA, 23 nt, Artificial Sequence
  Chemically synthesized
aagaaaagcacuuacuaaguuag

SEQ ID NO: 81546 - RNA, 23 nt, Artificial Sequence
  Chemically synthesized
acaauguaguguaaaucuccacu

SEQ ID NO: 81547 - RNA, 23 nt, Artificial Sequence
  Chemically synthesized
caauguaguguaaaucuccacuu

SEQ ID NO: 81548 - RNA, 23 nt, Artificial Sequence
  Chemically synthesized
aauguaguguaaaucuccacuuc

SEQ ID NO: 81549 - RNA, 23 nt, Artificial Sequence
  Chemically synthesized
auguaguguaaaucuccacuucg

SEQ ID NO: 81550 - RNA, 23 nt, Artificial Sequence
  Chemically synthesized
uguaguguaaaucuccacuucgu

SEQ ID NO: 81551 - RNA, 23 nt, Artificial Sequence
  Chemically synthesized
ucccauaagcccagauucaccgg

SEQ ID NO: 81552 - RNA, 23 nt, Artificial Sequence
  Chemically synthesized
cccauaagcccagauucaccggu

SEQ ID NO: 81553 - RNA, 23 nt, Artificial Sequence
  Chemically synthesized
ccauaagcccagauucaccgguu

SEQ ID NO: 81554 - RNA, 23 nt, Artificial Sequence
  Chemically synthesized
cauaagcccagauucaccgguuu

SEQ ID NO: 81555 - RNA, 23 nt, Artificial Sequence
  Chemically synthesized
caagugucugcaccuccuaacug

SEQ ID NO: 81556 - RNA, 23 nt, Artificial Sequence
  Chemically synthesized
aagugucugcaccuccuaacugc

SEQ ID NO: 81557 - RNA, 23 nt, Artificial Sequence
  Chemically synthesized
agugucugcaccuccuaacugca

SEQ ID NO: 81558 - RNA, 23 nt, Artificial Sequence
  Chemically synthesized
gugucugcaccuccuaacugcag

SEQ ID NO: 81559 - RNA, 23 nt, Artificial Sequence
  Chemically synthesized
ugucugcaccuccuaacugcaga

SEQ ID NO: 81560 - RNA, 23 nt, Artificial Sequence
  Chemically synthesized
cguaaucugucauaaucuucuug

SEQ ID NO: 81561 - RNA, 23 nt, Artificial Sequence
  Chemically synthesized
aaaucuccacuucguauuuuguc

SEQ ID NO: 81562 - RNA, 23 nt, Artificial Sequence
  Chemically synthesized
aaucuccacuucguauuuuguca

SEQ ID NO: 81563 - RNA, 23 nt, Artificial Sequence
  Chemically synthesized
aucuccacuucguauuuugucaa

SEQ ID NO: 81564 - RNA, 23 nt, Artificial Sequence
  Chemically synthesized
ucuccacuucguauuuugucaaa

SEQ ID NO: 81565 - RNA, 23 nt, Artificial Sequence
  Chemically synthesized
cuccacuucguauuuugucaaaa

SEQ ID NO: 81566 - RNA, 23 nt, Artificial Sequence
  Chemically synthesized
uccacuucguauuuugucaaaau

SEQ ID NO: 81567 - RNA, 23 nt, Artificial Sequence
  Chemically synthesized
cagcuucuucuccuucaguuucu

SEQ ID NO: 81568 - RNA, 23 nt, Artificial Sequence
  Chemically synthesized
agcuucuucuccuucaguuucuc

SEQ ID NO: 81569 - RNA, 23 nt, Artificial Sequence
  Chemically synthesized
ccacuaggaugaugggaguguug

SEQ ID NO: 81570 - RNA, 23 nt, Artificial Sequence
  Chemically synthesized
cacuaggaugaugggaguguugg

SEQ ID NO: 81571 - RNA, 23 nt, Artificial Sequence
  Chemically synthesized
acuaggaugaugggaguguuggg

SEQ ID NO: 81572 - RNA, 23 nt, Artificial Sequence
  Chemically synthesized
cuaggaugaugggaguguuggga

SEQ ID NO: 81573 - RNA, 23 nt, Artificial Sequence
  Chemically synthesized
uaggaugaugggaguguugggac

SEQ ID NO: 81574 - RNA, 23 nt, Artificial Sequence
  Chemically synthesized
cuuguccagcuguaucccauaag

SEQ ID NO: 81575 - RNA, 23 nt, Artificial Sequence
  Chemically synthesized
uuguccagcuguaucccauaagc

SEQ ID NO: 81576 - RNA, 23 nt, Artificial Sequence
  Chemically synthesized
uguccagcuguaucccauaagcc

SEQ ID NO: 81577 - RNA, 23 nt, Artificial Sequence
  Chemically synthesized
guccagcuguaucccauaagccc

SEQ ID NO: 81578 - RNA, 23 nt, Artificial Sequence
  Chemically synthesized
uccagcuguaucccauaagccca

SEQ ID NO: 81579 - RNA, 23 nt, Artificial Sequence
  Chemically synthesized
ccaucuaccauaacauuggcaga

SEQ ID NO: 81580 - RNA, 23 nt, Artificial Sequence
  Chemically synthesized
caucuaccauaacauuggcagaa

SEQ ID NO: 81581 - RNA, 23 nt, Artificial Sequence
  Chemically synthesized
aucuaccauaacauuggcagaau

SEQ ID NO: 81582 - RNA, 23 nt, Artificial Sequence
  Chemically synthesized
ucuaccauaacauuggcagaaua

SEQ ID NO: 81583 - RNA, 23 nt, Artificial Sequence
  Chemically synthesized
ccauaacauuggcagaauaauug

SEQ ID NO: 81584 - RNA, 23 nt, Artificial Sequence
  Chemically synthesized
cauaacauuggcagaauaauugu

SEQ ID NO: 81585 - RNA, 23 nt, Artificial Sequence
  Chemically synthesized
auaacauuggcagaauaauuguc

SEQ ID NO: 81586 - RNA, 23 nt, Artificial Sequence
  Chemically synthesized
uaacauuggcagaauaauuguca

SEQ ID NO: 81587 - RNA, 23 nt, Artificial Sequence
  Chemically synthesized
aacauuggcagaauaauugucaa

SEQ ID NO: 81588 - RNA, 23 nt, Artificial Sequence
  Chemically synthesized
ugcauugguuguguaacugauca

SEQ ID NO: 81589 - RNA, 23 nt, Artificial Sequence
  Chemically synthesized
gcauugguuguguaacugaucag

SEQ ID NO: 81590 - RNA, 23 nt, Artificial Sequence
  Chemically synthesized
cauugguuguguaacugaucagu

SEQ ID NO: 81591 - RNA, 23 nt, Artificial Sequence
  Chemically synthesized
auugguuguguaacugaucagua

SEQ ID NO: 81592 - RNA, 23 nt, Artificial Sequence
  Chemically synthesized
cucuuccucuucuucacgggagg

SEQ ID NO: 81593 - RNA, 23 nt, Artificial Sequence
  Chemically synthesized
ucuuccucuucuucacgggaggc

SEQ ID NO: 81594 - RNA, 23 nt, Artificial Sequence
  Chemically synthesized
ucuuguccagcuguaucccauaa

SEQ ID NO: 81595 - RNA, 23 nt, Artificial Sequence
  Chemically synthesized
uuuaaaaacuauaaagcugcaac

SEQ ID NO: 81596 - RNA, 23 nt, Artificial Sequence
  Chemically synthesized
uuaaaaacuauaaagcugcaaca

SEQ ID NO: 81597 - RNA, 23 nt, Artificial Sequence
  Chemically synthesized
uaaaaacuauaaagcugcaacac

SEQ ID NO: 81598 - RNA, 23 nt, Artificial Sequence
  Chemically synthesized
aaaaacuauaaagcugcaacaca

SEQ ID NO: 81599 - RNA, 23 nt, Artificial Sequence
  Chemically synthesized
aaaacuauaaagcugcaacacau

SEQ ID NO: 81600 - RNA, 23 nt, Artificial Sequence
  Chemically synthesized
ucauucgggaggcuguucugcuu

SEQ ID NO: 81601 - RNA, 23 nt, Artificial Sequence
  Chemically synthesized
uccuaacugcagaagcuaccguc

SEQ ID NO: 81602 - RNA, 23 nt, Artificial Sequence
  Chemically synthesized
ccuaacugcagaagcuaccgucu

SEQ ID NO: 81603 - RNA, 23 nt, Artificial Sequence
  Chemically synthesized
cuaacugcagaagcuaccgucuu

SEQ ID NO: 81604 - RNA, 23 nt, Artificial Sequence
  Chemically synthesized
uaacugcagaagcuaccgucuuc

SEQ ID NO: 81605 - RNA, 23 nt, Artificial Sequence
  Chemically synthesized
aacugcagaagcuaccgucuucu

SEQ ID NO: 81606 - RNA, 23 nt, Artificial Sequence
  Chemically synthesized
gcaggcauuuucucuuccucuuc

SEQ ID NO: 81607 - RNA, 23 nt, Artificial Sequence
  Chemically synthesized
agaauaauugucaaagacaguag

SEQ ID NO: 81608 - RNA, 23 nt, Artificial Sequence
  Chemically synthesized
gaauaauugucaaagacaguagg

SEQ ID NO: 81609 - RNA, 23 nt, Artificial Sequence
  Chemically synthesized
aauaauugucaaagacaguaggg

SEQ ID NO: 81610 - RNA, 23 nt, Artificial Sequence
  Chemically synthesized
auaauugucaaagacaguaggga

SEQ ID NO: 81611 - RNA, 23 nt, Artificial Sequence
  Chemically synthesized
uaauugucaaagacaguagggau

SEQ ID NO: 81612 - RNA, 23 nt, Artificial Sequence
  Chemically synthesized
uagaguuuuuacccgugacacuu

SEQ ID NO: 81613 - RNA, 23 nt, Artificial Sequence
  Chemically synthesized
uacaauguaguguaaaucuccac

SEQ ID NO: 81614 - RNA, 23 nt, Artificial Sequence
  Chemically synthesized
ucgugucuuuaucaucccuaaga

SEQ ID NO: 81615 - RNA, 23 nt, Artificial Sequence
  Chemically synthesized
cgugucuuuaucaucccuaagau

SEQ ID NO: 81616 - RNA, 23 nt, Artificial Sequence
  Chemically synthesized
gugucuuuaucaucccuaagauc

SEQ ID NO: 81617 - RNA, 23 nt, Artificial Sequence
  Chemically synthesized
ccacuuugcacggacauuuucaa

SEQ ID NO: 81618 - RNA, 23 nt, Artificial Sequence
  Chemically synthesized
cacuuugcacggacauuuucaaa

SEQ ID NO: 81619 - RNA, 23 nt, Artificial Sequence
  Chemically synthesized
acuuugcacggacauuuucaaau

SEQ ID NO: 81620 - RNA, 23 nt, Artificial Sequence
  Chemically synthesized
cuuugcacggacauuuucaaaug

SEQ ID NO: 81621 - RNA, 23 nt, Artificial Sequence
  Chemically synthesized
uuugcacggacauuuucaaauga

SEQ ID NO: 81622 - RNA, 23 nt, Artificial Sequence
  Chemically synthesized
acacuccacaauucugcaacugu

SEQ ID NO: 81623 - RNA, 23 nt, Artificial Sequence
  Chemically synthesized
cacuccacaauucugcaacuguc

SEQ ID NO: 81624 - RNA, 23 nt, Artificial Sequence
  Chemically synthesized
acuccacaauucugcaacuguca

SEQ ID NO: 81625 - RNA, 23 nt, Artificial Sequence
  Chemically synthesized
cuccacaauucugcaacugucaa

SEQ ID NO: 81626 - RNA, 23 nt, Artificial Sequence
  Chemically synthesized
uccacaauucugcaacugucaau

SEQ ID NO: 81627 - RNA, 23 nt, Artificial Sequence
  Chemically synthesized
acuaaucgacaaaaaaaccuucu

SEQ ID NO: 81628 - RNA, 23 nt, Artificial Sequence
  Chemically synthesized
cuaaucgacaaaaaaaccuucua

SEQ ID NO: 81629 - RNA, 23 nt, Artificial Sequence
  Chemically synthesized
uaaucgacaaaaaaaccuucuaa

SEQ ID NO: 81630 - RNA, 23 nt, Artificial Sequence
  Chemically synthesized
aaucgacaaaaaaaccuucuaau

SEQ ID NO: 81631 - RNA, 23 nt, Artificial Sequence
  Chemically synthesized
aucgacaaaaaaaccuucuaaug

SEQ ID NO: 81632 - RNA, 23 nt, Artificial Sequence
  Chemically synthesized
uuacuaaguuagcgacuaacaga

SEQ ID NO: 81633 - RNA, 23 nt, Artificial Sequence
  Chemically synthesized
uacuaaguuagcgacuaacagaa

SEQ ID NO: 81634 - RNA, 23 nt, Artificial Sequence
  Chemically synthesized
acuaaguuagcgacuaacagaac

SEQ ID NO: 81635 - RNA, 23 nt, Artificial Sequence
  Chemically synthesized
cuaaguuagcgacuaacagaaca

SEQ ID NO: 81636 - RNA, 23 nt, Artificial Sequence
  Chemically synthesized
uaaguuagcgacuaacagaacaa

SEQ ID NO: 81637 - RNA, 23 nt, Artificial Sequence
  Chemically synthesized
ucuguaacaaaaaguuggcauug

SEQ ID NO: 81638 - RNA, 23 nt, Artificial Sequence
  Chemically synthesized
cuuccucuucuucacgggaggcg

SEQ ID NO: 81639 - RNA, 23 nt, Artificial Sequence
  Chemically synthesized
uuccucuucuucacgggaggcgg

SEQ ID NO: 81640 - RNA, 23 nt, Artificial Sequence
  Chemically synthesized
gcuguaucccauaagcccagauu

SEQ ID NO: 81641 - RNA, 23 nt, Artificial Sequence
  Chemically synthesized
acauuggcagaauaauugucaaa

SEQ ID NO: 81642 - RNA, 23 nt, Artificial Sequence
  Chemically synthesized
cauuggcagaauaauugucaaag

SEQ ID NO: 81643 - RNA, 23 nt, Artificial Sequence
  Chemically synthesized
auuggcagaauaauugucaaaga

SEQ ID NO: 81644 - RNA, 23 nt, Artificial Sequence
  Chemically synthesized
aguuagcgacuaacagaacaacc

SEQ ID NO: 81645 - RNA, 23 nt, Artificial Sequence
  Chemically synthesized
guuagcgacuaacagaacaacca

SEQ ID NO: 81646 - RNA, 23 nt, Artificial Sequence
  Chemically synthesized
uuagcgacuaacagaacaaccag

SEQ ID NO: 81647 - RNA, 23 nt, Artificial Sequence
  Chemically synthesized
uagcgacuaacagaacaaccagu

SEQ ID NO: 81648 - RNA, 23 nt, Artificial Sequence
  Chemically synthesized
agcgacuaacagaacaaccaguu

SEQ ID NO: 81649 - RNA, 23 nt, Artificial Sequence
  Chemically synthesized
aggaugaugggaguguugggaca

SEQ ID NO: 81650 - RNA, 23 nt, Artificial Sequence
  Chemically synthesized
ggaugaugggaguguugggacag

SEQ ID NO: 81651 - RNA, 23 nt, Artificial Sequence
  Chemically synthesized
gaugaugggaguguugggacagu

SEQ ID NO: 81652 - RNA, 23 nt, Artificial Sequence
  Chemically synthesized
augaugggaguguugggacagug

SEQ ID NO: 81653 - RNA, 23 nt, Artificial Sequence
  Chemically synthesized
accacuuugcacggacauuuuca

SEQ ID NO: 81654 - RNA, 23 nt, Artificial Sequence
  Chemically synthesized
ucaaaugaugcaggacucacaag

SEQ ID NO: 81655 - RNA, 23 nt, Artificial Sequence
  Chemically synthesized
augcauugguuguguaacugauc

SEQ ID NO: 81656 - RNA, 23 nt, Artificial Sequence
  Chemically synthesized
uguacaauguaguguaaaucucc

SEQ ID NO: 81657 - RNA, 23 nt, Artificial Sequence
  Chemically synthesized
guacaauguaguguaaaucucca

SEQ ID NO: 81658 - RNA, 23 nt, Artificial Sequence
  Chemically synthesized
uaggugaugggagucagcuucuu

SEQ ID NO: 81659 - RNA, 23 nt, Artificial Sequence
  Chemically synthesized
ugagucugaacucuuacauuuag

SEQ ID NO: 81660 - RNA, 23 nt, Artificial Sequence
  Chemically synthesized
gagucugaacucuuacauuuaga

SEQ ID NO: 81661 - RNA, 23 nt, Artificial Sequence
  Chemically synthesized
agucugaacucuuacauuuagaa

SEQ ID NO: 81662 - RNA, 23 nt, Artificial Sequence
  Chemically synthesized
gucugaacucuuacauuuagaac

SEQ ID NO: 81663 - RNA, 23 nt, Artificial Sequence
  Chemically synthesized
ucugaacucuuacauuuagaaca

SEQ ID NO: 81664 - RNA, 23 nt, Artificial Sequence
  Chemically synthesized
ugggagucagcuucuucuccuuc

SEQ ID NO: 81665 - RNA, 23 nt, Artificial Sequence
  Chemically synthesized
uugcacggacauuuucaaaugau

SEQ ID NO: 81666 - RNA, 23 nt, Artificial Sequence
  Chemically synthesized
ugcacggacauuuucaaaugaug

SEQ ID NO: 81667 - RNA, 23 nt, Artificial Sequence
  Chemically synthesized
auaagcccagauucaccgguuuu

SEQ ID NO: 81668 - RNA, 23 nt, Artificial Sequence
  Chemically synthesized
uaagcccagauucaccgguuuuc

SEQ ID NO: 81669 - RNA, 23 nt, Artificial Sequence
  Chemically synthesized
cacuuacuaaguuagcgacuaac

SEQ ID NO: 81670 - RNA, 23 nt, Artificial Sequence
  Chemically synthesized
acuuacuaaguuagcgacuaaca

SEQ ID NO: 81671 - RNA, 23 nt, Artificial Sequence
  Chemically synthesized
cuuacuaaguuagcgacuaacag

SEQ ID NO: 81672 - RNA, 23 nt, Artificial Sequence
  Chemically synthesized
uccugauaauaccaaccuuucuu

SEQ ID NO: 81673 - RNA, 23 nt, Artificial Sequence
  Chemically synthesized
ccugauaauaccaaccuuucuuu

SEQ ID NO: 81674 - RNA, 23 nt, Artificial Sequence
  Chemically synthesized
guaguguaaaucuccacuucgua

SEQ ID NO: 81675 - RNA, 23 nt, Artificial Sequence
  Chemically synthesized
uaguguaaaucuccacuucguau

SEQ ID NO: 81676 - RNA, 23 nt, Artificial Sequence
  Chemically synthesized
uaaucuucuuguccagcuguauc

SEQ ID NO: 81677 - RNA, 23 nt, Artificial Sequence
  Chemically synthesized
uuauuaagucauacaugcaaaac

SEQ ID NO: 81678 - RNA, 23 nt, Artificial Sequence
  Chemically synthesized
ccacaauucugcaacugucaauu

SEQ ID NO: 81679 - RNA, 23 nt, Artificial Sequence
  Chemically synthesized
cacaauucugcaacugucaauuu

SEQ ID NO: 81680 - RNA, 23 nt, Artificial Sequence
  Chemically synthesized
agggucaguauuggucaagugac

SEQ ID NO: 81681 - RNA, 23 nt, Artificial Sequence
  Chemically synthesized
gggucaguauuggucaagugaca

SEQ ID NO: 81682 - RNA, 23 nt, Artificial Sequence
  Chemically synthesized
ggucaguauuggucaagugacag

SEQ ID NO: 81683 - RNA, 23 nt, Artificial Sequence
  Chemically synthesized
uacuaaucgacaaaaaaaccuuc

SEQ ID NO: 81684 - RNA, 23 nt, Artificial Sequence
  Chemically synthesized
aaguuagcgacuaacagaacaac

SEQ ID NO: 81685 - RNA, 23 nt, Artificial Sequence
  Chemically synthesized
caccuccuaacugcagaagcuac

SEQ ID NO: 81686 - RNA, 23 nt, Artificial Sequence
  Chemically synthesized
accuccuaacugcagaagcuacc

SEQ ID NO: 81687 - RNA, 23 nt, Artificial Sequence
  Chemically synthesized
ccuccuaacugcagaagcuaccg

SEQ ID NO: 81688 - RNA, 23 nt, Artificial Sequence
  Chemically synthesized
cuccuaacugcagaagcuaccgu

SEQ ID NO: 81689 - RNA, 23 nt, Artificial Sequence
  Chemically synthesized
cugcagagaaacaggaaauggcc

SEQ ID NO: 81690 - RNA, 23 nt, Artificial Sequence
  Chemically synthesized
ugcagagaaacaggaaauggccg

SEQ ID NO: 81691 - RNA, 23 nt, Artificial Sequence
  Chemically synthesized
gcagagaaacaggaaauggccgc

SEQ ID NO: 81692 - RNA, 23 nt, Artificial Sequence
  Chemically synthesized
cagagaaacaggaaauggccgcu

SEQ ID NO: 81693 - RNA, 23 nt, Artificial Sequence
  Chemically synthesized
agagaaacaggaaauggccgcuc

SEQ ID NO: 81694 - RNA, 23 nt, Artificial Sequence
  Chemically synthesized
gggcguaaucugucauaaucuuc

SEQ ID NO: 81695 - RNA, 23 nt, Artificial Sequence
  Chemically synthesized
ggcguaaucugucauaaucuucu

SEQ ID NO: 81696 - RNA, 23 nt, Artificial Sequence
  Chemically synthesized
gcguaaucugucauaaucuucuu

SEQ ID NO: 81697 - RNA, 23 nt, Artificial Sequence
  Chemically synthesized
ucugcaacugucaauuuaaaaaa

SEQ ID NO: 81698 - RNA, 23 nt, Artificial Sequence
  Chemically synthesized
guuaagaagguucauaguuuaag

SEQ ID NO: 81699 - RNA, 23 nt, Artificial Sequence
  Chemically synthesized
uuaagaagguucauaguuuaaga

SEQ ID NO: 81700 - RNA, 23 nt, Artificial Sequence
  Chemically synthesized
uaagaagguucauaguuuaagaa

SEQ ID NO: 81701 - RNA, 23 nt, Artificial Sequence
  Chemically synthesized
aagaagguucauaguuuaagaau

SEQ ID NO: 81702 - RNA, 23 nt, Artificial Sequence
  Chemically synthesized
agaagguucauaguuuaagaauu

SEQ ID NO: 81703 - RNA, 23 nt, Artificial Sequence
  Chemically synthesized
acugcauuugacagaaauuaacc

SEQ ID NO: 81704 - RNA, 23 nt, Artificial Sequence
  Chemically synthesized
cugcauuugacagaaauuaaccu

SEQ ID NO: 81705 - RNA, 23 nt, Artificial Sequence
  Chemically synthesized
ugcauuugacagaaauuaaccuu

SEQ ID NO: 81706 - RNA, 23 nt, Artificial Sequence
  Chemically synthesized
gcauuugacagaaauuaaccuuu

SEQ ID NO: 81707 - RNA, 23 nt, Artificial Sequence
  Chemically synthesized
cauuugacagaaauuaaccuuuu

SEQ ID NO: 81708 - RNA, 23 nt, Artificial Sequence
  Chemically synthesized
ccuuguacaauguaguguaaauc

SEQ ID NO: 81709 - RNA, 23 nt, Artificial Sequence
  Chemically synthesized
cuuguacaauguaguguaaaucu

SEQ ID NO: 81710 - RNA, 23 nt, Artificial Sequence
  Chemically synthesized
uuguacaauguaguguaaaucuc

SEQ ID NO: 81711 - RNA, 23 nt, Artificial Sequence
  Chemically synthesized
aggaaaugcauugguuguguaac

SEQ ID NO: 81712 - RNA, 23 nt, Artificial Sequence
  Chemically synthesized
ggaaaugcauugguuguguaacu

SEQ ID NO: 81713 - RNA, 23 nt, Artificial Sequence
  Chemically synthesized
gaaaugcauugguuguguaacug

SEQ ID NO: 81714 - RNA, 23 nt, Artificial Sequence
  Chemically synthesized
aaaugcauugguuguguaacuga

SEQ ID NO: 81715 - RNA, 23 nt, Artificial Sequence
  Chemically synthesized
aaugcauugguuguguaacugau

SEQ ID NO: 81716 - RNA, 23 nt, Artificial Sequence
  Chemically synthesized
gagcugcuacgcucacuccauua

SEQ ID NO: 81717 - RNA, 23 nt, Artificial Sequence
  Chemically synthesized
agcugcuacgcucacuccauuac

SEQ ID NO: 81718 - RNA, 23 nt, Artificial Sequence
  Chemically synthesized
gcugcuacgcucacuccauuaca

SEQ ID NO: 81719 - RNA, 23 nt, Artificial Sequence
  Chemically synthesized
cugcaccuccuaacugcagaagc

SEQ ID NO: 81720 - RNA, 23 nt, Artificial Sequence
  Chemically synthesized
ugcaccuccuaacugcagaagcu

SEQ ID NO: 81721 - RNA, 23 nt, Artificial Sequence
  Chemically synthesized
gcaccuccuaacugcagaagcua

SEQ ID NO: 81722 - RNA, 23 nt, Artificial Sequence
  Chemically synthesized
ugcaaaguucagugcucgguguu

SEQ ID NO: 81723 - RNA, 23 nt, Artificial Sequence
  Chemically synthesized
gcaaaguucagugcucgguguuc

SEQ ID NO: 81724 - RNA, 23 nt, Artificial Sequence
  Chemically synthesized
caaaguucagugcucgguguucu

SEQ ID NO: 81725 - RNA, 23 nt, Artificial Sequence
  Chemically synthesized
uuuuacuaaucgacaaaaaaacc

SEQ ID NO: 81726 - RNA, 23 nt, Artificial Sequence
  Chemically synthesized
uuuacuaaucgacaaaaaaaccu

SEQ ID NO: 81727 - RNA, 23 nt, Artificial Sequence
  Chemically synthesized
uuacuaaucgacaaaaaaaccuu

SEQ ID NO: 81728 - RNA, 23 nt, Artificial Sequence
  Chemically synthesized
ucgacaaaaaaaccuucuaaugc

SEQ ID NO: 81729 - RNA, 23 nt, Artificial Sequence
  Chemically synthesized
cgacaaaaaaaccuucuaaugca

SEQ ID NO: 81730 - RNA, 23 nt, Artificial Sequence
  Chemically synthesized
gacaaaaaaaccuucuaaugcau

SEQ ID NO: 81731 - RNA, 23 nt, Artificial Sequence
  Chemically synthesized
acaaaaaaaccuucuaaugcauu

SEQ ID NO: 81732 - RNA, 23 nt, Artificial Sequence
  Chemically synthesized
caaaaaaaccuucuaaugcauua

SEQ ID NO: 81733 - RNA, 23 nt, Artificial Sequence
  Chemically synthesized
aacugaucaguaggcaaguuuua

SEQ ID NO: 81734 - RNA, 23 nt, Artificial Sequence
  Chemically synthesized
aggcuguucugcuuuacgcaucu

SEQ ID NO: 81735 - RNA, 23 nt, Artificial Sequence
  Chemically synthesized
ggcuguucugcuuuacgcaucug

SEQ ID NO: 81736 - RNA, 23 nt, Artificial Sequence
  Chemically synthesized
ccagcuguaucccauaagcccag

SEQ ID NO: 81737 - RNA, 23 nt, Artificial Sequence
  Chemically synthesized
cagcuguaucccauaagcccaga

SEQ ID NO: 81738 - RNA, 23 nt, Artificial Sequence
  Chemically synthesized
agcuguaucccauaagcccagau

SEQ ID NO: 81739 - RNA, 23 nt, Artificial Sequence
  Chemically synthesized
ucaaagacaguagggauauauuc

SEQ ID NO: 81740 - RNA, 23 nt, Artificial Sequence
  Chemically synthesized
caaagacaguagggauauauucu

SEQ ID NO: 81741 - RNA, 23 nt, Artificial Sequence
  Chemically synthesized
aaagacaguagggauauauucuc

SEQ ID NO: 81742 - RNA, 23 nt, Artificial Sequence
  Chemically synthesized
aagacaguagggauauauucucc

SEQ ID NO: 81743 - RNA, 23 nt, Artificial Sequence
  Chemically synthesized
agacaguagggauauauucucca

SEQ ID NO: 81744 - RNA, 23 nt, Artificial Sequence
  Chemically synthesized
agggauauauucuccaggaaaug

SEQ ID NO: 81745 - RNA, 23 nt, Artificial Sequence
  Chemically synthesized
accucacagacccaaaggaacau

SEQ ID NO: 81746 - RNA, 23 nt, Artificial Sequence
  Chemically synthesized
ccucacagacccaaaggaacauc

SEQ ID NO: 81747 - RNA, 23 nt, Artificial Sequence
  Chemically synthesized
agagggucaguauuggucaagug

SEQ ID NO: 81748 - RNA, 23 nt, Artificial Sequence
  Chemically synthesized
gagaaacaggaaauggccgcucc

SEQ ID NO: 81749 - RNA, 23 nt, Artificial Sequence
  Chemically synthesized
agaaacaggaaauggccgcucca

SEQ ID NO: 81750 - RNA, 23 nt, Artificial Sequence
  Chemically synthesized
aagcccagauucaccgguuuucc

SEQ ID NO: 81751 - RNA, 23 nt, Artificial Sequence
  Chemically synthesized
agcccagauucaccgguuuucca

SEQ ID NO: 81752 - RNA, 23 nt, Artificial Sequence
  Chemically synthesized
gcccagauucaccgguuuuccau

SEQ ID NO: 81753 - RNA, 23 nt, Artificial Sequence
  Chemically synthesized
cccagauucaccgguuuuccauc

SEQ ID NO: 81754 - RNA, 23 nt, Artificial Sequence
  Chemically synthesized
gagggucaguauuggucaaguga

SEQ ID NO: 81755 - RNA, 23 nt, Artificial Sequence
  Chemically synthesized
aaaaaaccuucuaaugcauuauc

SEQ ID NO: 81756 - RNA, 23 nt, Artificial Sequence
  Chemically synthesized
aaaaaccuucuaaugcauuauca

SEQ ID NO: 81757 - RNA, 23 nt, Artificial Sequence
  Chemically synthesized
aaaaccuucuaaugcauuaucag

SEQ ID NO: 81758 - RNA, 23 nt, Artificial Sequence
  Chemically synthesized
aaaccuucuaaugcauuaucaga

SEQ ID NO: 81759 - RNA, 23 nt, Artificial Sequence
  Chemically synthesized
aaccuucuaaugcauuaucagaa

SEQ ID NO: 81760 - RNA, 23 nt, Artificial Sequence
  Chemically synthesized
gcgacuaacagaacaaccaguuu

SEQ ID NO: 81761 - RNA, 23 nt, Artificial Sequence
  Chemically synthesized
cgacuaacagaacaaccaguuua

SEQ ID NO: 81762 - RNA, 23 nt, Artificial Sequence
  Chemically synthesized
gacuaacagaacaaccaguuuaa

SEQ ID NO: 81763 - RNA, 23 nt, Artificial Sequence
  Chemically synthesized
acuaacagaacaaccaguuuaaa

SEQ ID NO: 81764 - RNA, 23 nt, Artificial Sequence
  Chemically synthesized
cuaacagaacaaccaguuuaaag

SEQ ID NO: 81765 - RNA, 23 nt, Artificial Sequence
  Chemically synthesized
uaacagaacaaccaguuuaaaga

SEQ ID NO: 81766 - RNA, 23 nt, Artificial Sequence
  Chemically synthesized
uccauuacaguacaauguuaugu

SEQ ID NO: 81767 - RNA, 23 nt, Artificial Sequence
  Chemically synthesized
gcaguguaguucagaagguauuu

SEQ ID NO: 81768 - RNA, 23 nt, Artificial Sequence
  Chemically synthesized
caguguaguucagaagguauuuu

SEQ ID NO: 81769 - RNA, 23 nt, Artificial Sequence
  Chemically synthesized
aacucuuaaucugaacaagaaug

SEQ ID NO: 81770 - RNA, 23 nt, Artificial Sequence
  Chemically synthesized
cuguaacaaaaaguuggcauuga

SEQ ID NO: 81771 - RNA, 23 nt, Artificial Sequence
  Chemically synthesized
uguaacaaaaaguuggcauugag

SEQ ID NO: 81772 - RNA, 23 nt, Artificial Sequence
  Chemically synthesized
guaacaaaaaguuggcauugagu

SEQ ID NO: 81773 - RNA, 23 nt, Artificial Sequence
  Chemically synthesized
caaacacugucuugaggccucgc

SEQ ID NO: 81774 - RNA, 23 nt, Artificial Sequence
  Chemically synthesized
aaacacugucuugaggccucgcu

SEQ ID NO: 81775 - RNA, 23 nt, Artificial Sequence
  Chemically synthesized
aacacugucuugaggccucgcug

SEQ ID NO: 81776 - RNA, 23 nt, Artificial Sequence
  Chemically synthesized
ggucaagugacagugucgguaau

SEQ ID NO: 81777 - RNA, 23 nt, Artificial Sequence
  Chemically synthesized
gucaagugacagugucgguaauc

SEQ ID NO: 81778 - RNA, 23 nt, Artificial Sequence
  Chemically synthesized
cugaauaaaguaacauggaaagc

SEQ ID NO: 81779 - RNA, 23 nt, Artificial Sequence
  Chemically synthesized
agaaaagcacuuacuaaguuagc

SEQ ID NO: 81780 - RNA, 23 nt, Artificial Sequence
  Chemically synthesized
gaaaagcacuuacuaaguuagcg

SEQ ID NO: 81781 - RNA, 23 nt, Artificial Sequence
  Chemically synthesized
aaaagcacuuacuaaguuagcga

SEQ ID NO: 81782 - RNA, 23 nt, Artificial Sequence
  Chemically synthesized
aaagcacuuacuaaguuagcgac

SEQ ID NO: 81783 - RNA, 23 nt, Artificial Sequence
  Chemically synthesized
agcaagugucugcaccuccuaac

SEQ ID NO: 81784 - RNA, 23 nt, Artificial Sequence
  Chemically synthesized
gcaagugucugcaccuccuaacu

SEQ ID NO: 81785 - RNA, 23 nt, Artificial Sequence
  Chemically synthesized
uaaucugaacaagaauggggggg

SEQ ID NO: 81786 - RNA, 23 nt, Artificial Sequence
  Chemically synthesized
ucagcuucuucuccuucaguuuc

SEQ ID NO: 81787 - RNA, 23 nt, Artificial Sequence
  Chemically synthesized
uaccacuuugcacggacauuuuc

SEQ ID NO: 81788 - RNA, 23 nt, Artificial Sequence
  Chemically synthesized
gaaaagcaaauuaagaacacauc

SEQ ID NO: 81789 - RNA, 23 nt, Artificial Sequence
  Chemically synthesized
aaaagcaaauuaagaacacaucu

SEQ ID NO: 81790 - RNA, 23 nt, Artificial Sequence
  Chemically synthesized
aaagcaaauuaagaacacaucug

SEQ ID NO: 81791 - RNA, 23 nt, Artificial Sequence
  Chemically synthesized
aagcaaauuaagaacacaucugu

SEQ ID NO: 81792 - RNA, 23 nt, Artificial Sequence
  Chemically synthesized
agcaaauuaagaacacaucuguu

SEQ ID NO: 81793 - RNA, 23 nt, Artificial Sequence
  Chemically synthesized
caccgguuuuccaucuaccauaa

SEQ ID NO: 81794 - RNA, 23 nt, Artificial Sequence
  Chemically synthesized
ucuccaggaaaugcauugguugu

SEQ ID NO: 81795 - RNA, 23 nt, Artificial Sequence
  Chemically synthesized
guaggcaaguuuuaccuacagcu

SEQ ID NO: 81796 - RNA, 23 nt, Artificial Sequence
  Chemically synthesized
uaggcaaguuuuaccuacagcuc

SEQ ID NO: 81797 - RNA, 23 nt, Artificial Sequence
  Chemically synthesized
aggcaaguuuuaccuacagcucu

SEQ ID NO: 81798 - RNA, 23 nt, Artificial Sequence
  Chemically synthesized
ggcaaguuuuaccuacagcucua

SEQ ID NO: 81799 - RNA, 23 nt, Artificial Sequence
  Chemically synthesized
gcaaguuuuaccuacagcucuau

SEQ ID NO: 81800 - RNA, 23 nt, Artificial Sequence
  Chemically synthesized
aauagcaguucuguucaaaaucu

SEQ ID NO: 81801 - RNA, 23 nt, Artificial Sequence
  Chemically synthesized
cugcuuuacgcaucugagaacua

SEQ ID NO: 81802 - RNA, 23 nt, Artificial Sequence
  Chemically synthesized
acugcagaagcuaccgucuucuc

SEQ ID NO: 81803 - RNA, 23 nt, Artificial Sequence
  Chemically synthesized
cugcagaagcuaccgucuucuca

SEQ ID NO: 81804 - RNA, 23 nt, Artificial Sequence
  Chemically synthesized
ugcagaagcuaccgucuucucaa

SEQ ID NO: 81805 - RNA, 23 nt, Artificial Sequence
  Chemically synthesized
ccgcaccucaggauaccacuuug

SEQ ID NO: 81806 - RNA, 23 nt, Artificial Sequence
  Chemically synthesized
cgcaccucaggauaccacuuugc

SEQ ID NO: 81807 - RNA, 23 nt, Artificial Sequence
  Chemically synthesized
gcaccucaggauaccacuuugca

SEQ ID NO: 81808 - RNA, 23 nt, Artificial Sequence
  Chemically synthesized
aggauaccacuuugcacggacau

SEQ ID NO: 81809 - RNA, 23 nt, Artificial Sequence
  Chemically synthesized
ggauaccacuuugcacggacauu

SEQ ID NO: 81810 - RNA, 23 nt, Artificial Sequence
  Chemically synthesized
gauaccacuuugcacggacauuu

SEQ ID NO: 81811 - RNA, 23 nt, Artificial Sequence
  Chemically synthesized
auaccacuuugcacggacauuuu

SEQ ID NO: 81812 - RNA, 23 nt, Artificial Sequence
  Chemically synthesized
ggacucacaagggaaaagcaaau

SEQ ID NO: 81813 - RNA, 23 nt, Artificial Sequence
  Chemically synthesized
gacucacaagggaaaagcaaauu

SEQ ID NO: 81814 - RNA, 23 nt, Artificial Sequence
  Chemically synthesized
gguucuauaagaaaagcacuuac

SEQ ID NO: 81815 - RNA, 23 nt, Artificial Sequence
  Chemically synthesized
guucuauaagaaaagcacuuacu

SEQ ID NO: 81816 - RNA, 23 nt, Artificial Sequence
  Chemically synthesized
uucuauaagaaaagcacuuacua

SEQ ID NO: 81817 - RNA, 23 nt, Artificial Sequence
  Chemically synthesized
ucuauaagaaaagcacuuacuaa

SEQ ID NO: 81818 - RNA, 23 nt, Artificial Sequence
  Chemically synthesized
ggcauggcagguguaagagaaag

SEQ ID NO: 81819 - RNA, 23 nt, Artificial Sequence
  Chemically synthesized
gcauggcagguguaagagaaagg

SEQ ID NO: 81820 - RNA, 23 nt, Artificial Sequence
  Chemically synthesized
cauggcagguguaagagaaagga

SEQ ID NO: 81821 - RNA, 23 nt, Artificial Sequence
  Chemically synthesized
auggcagguguaagagaaaggaa

SEQ ID NO: 81822 - RNA, 23 nt, Artificial Sequence
  Chemically synthesized
uggcagguguaagagaaaggaaa

SEQ ID NO: 81823 - RNA, 23 nt, Artificial Sequence
  Chemically synthesized
gaaacaggaaauggccgcuccac

SEQ ID NO: 81824 - RNA, 23 nt, Artificial Sequence
  Chemically synthesized
aaacaggaaauggccgcuccacu

SEQ ID NO: 81825 - RNA, 23 nt, Artificial Sequence
  Chemically synthesized
cgggaggcuguucugcuuuacgc

SEQ ID NO: 81826 - RNA, 23 nt, Artificial Sequence
  Chemically synthesized
gggaggcuguucugcuuuacgca

SEQ ID NO: 81827 - RNA, 23 nt, Artificial Sequence
  Chemically synthesized
ggaggcuguucugcuuuacgcau

SEQ ID NO: 81828 - RNA, 23 nt, Artificial Sequence
  Chemically synthesized
gaggcuguucugcuuuacgcauc

SEQ ID NO: 81829 - RNA, 23 nt, Artificial Sequence
  Chemically synthesized
acugcagagaaacaggaaauggc

SEQ ID NO: 81830 - RNA, 23 nt, Artificial Sequence
  Chemically synthesized
cacccaaagcugaggaaaacugc

SEQ ID NO: 81831 - RNA, 23 nt, Artificial Sequence
  Chemically synthesized
acccaaagcugaggaaaacugca

SEQ ID NO: 81832 - RNA, 23 nt, Artificial Sequence
  Chemically synthesized
cccaaagcugaggaaaacugcag

SEQ ID NO: 81833 - RNA, 23 nt, Artificial Sequence
  Chemically synthesized
ccaaagcugaggaaaacugcaga

SEQ ID NO: 81834 - RNA, 23 nt, Artificial Sequence
  Chemically synthesized
caaagcugaggaaaacugcagag

SEQ ID NO: 81835 - RNA, 23 nt, Artificial Sequence
  Chemically synthesized
aauugucaaagacaguagggaua

SEQ ID NO: 81836 - RNA, 23 nt, Artificial Sequence
  Chemically synthesized
auugucaaagacaguagggauau

SEQ ID NO: 81837 - RNA, 23 nt, Artificial Sequence
  Chemically synthesized
uugucaaagacaguagggauaua

SEQ ID NO: 81838 - RNA, 23 nt, Artificial Sequence
  Chemically synthesized
gucgguaaucuggcaagacagug

SEQ ID NO: 81839 - RNA, 23 nt, Artificial Sequence
  Chemically synthesized
aagcacuuacuaaguuagcgacu

SEQ ID NO: 81840 - RNA, 23 nt, Artificial Sequence
  Chemically synthesized
gugagucugaacucuuacauuua

SEQ ID NO: 81841 - RNA, 23 nt, Artificial Sequence
  Chemically synthesized
cugcucggaucgcuucgucaaac

SEQ ID NO: 81842 - RNA, 23 nt, Artificial Sequence
  Chemically synthesized
ugcucggaucgcuucgucaaaca

SEQ ID NO: 81843 - RNA, 23 nt, Artificial Sequence
  Chemically synthesized
gcucggaucgcuucgucaaacac

SEQ ID NO: 81844 - RNA, 23 nt, Artificial Sequence
  Chemically synthesized
cucggaucgcuucgucaaacacu

SEQ ID NO: 81845 - RNA, 23 nt, Artificial Sequence
  Chemically synthesized
gacaguagggauauauucuccag

SEQ ID NO: 81846 - RNA, 23 nt, Artificial Sequence
  Chemically synthesized
gggcgagguaaagagggucagua

SEQ ID NO: 81847 - RNA, 23 nt, Artificial Sequence
  Chemically synthesized
ggcgagguaaagagggucaguau

SEQ ID NO: 81848 - RNA, 23 nt, Artificial Sequence
  Chemically synthesized
gcgagguaaagagggucaguauu

SEQ ID NO: 81849 - RNA, 19 nt, Artificial Sequence
  Chemically synthesized
cccagauaccgauguuaua

SEQ ID NO: 81850 - RNA, 19 nt, Artificial Sequence
  Chemically synthesized
gauuauuaacgauguccaa

SEQ ID NO: 81851 - RNA, 19 nt, Artificial Sequence
  Chemically synthesized
caaagauggagugagagag

SEQ ID NO: 81852 - RNA, 19 nt, Artificial Sequence
  Chemically synthesized
ugggcuaaguaaauaggaa

SEQ ID NO: 81853 - RNA, 19 nt, Artificial Sequence
  Chemically synthesized
gugagagagguuuuugaaa

SEQ ID NO: 81854 - RNA, 19 nt, Artificial Sequence
  Chemically synthesized
cauggagcugggcuaagua

SEQ ID NO: 81855 - RNA, 19 nt, Artificial Sequence
  Chemically synthesized
ggaaagacaugcuugcuca

SEQ ID NO: 81856 - RNA, 19 nt, Artificial Sequence
  Chemically synthesized
gccggugaaaccugaagaa

SEQ ID NO: 81857 - RNA, 19 nt, Artificial Sequence
  Chemically synthesized
uggagcugggcuaaguaaa

SEQ ID NO: 81858 - RNA, 19 nt, Artificial Sequence
  Chemically synthesized
auaucgagguggauggaaa

SEQ ID NO: 81859 - RNA, 19 nt, Artificial Sequence
  Chemically synthesized
aaagauggagugagagagg

SEQ ID NO: 81860 - RNA, 19 nt, Artificial Sequence
  Chemically synthesized
agugagagagguuuuugaa

SEQ ID NO: 81861 - RNA, 19 nt, Artificial Sequence
  Chemically synthesized
gaaaaugggcucaaccaga

SEQ ID NO: 81862 - RNA, 19 nt, Artificial Sequence
  Chemically synthesized
ggagccuguggaaagacau

SEQ ID NO: 81863 - RNA, 19 nt, Artificial Sequence
  Chemically synthesized
agcugggcaggaagauuau

SEQ ID NO: 81864 - RNA, 19 nt, Artificial Sequence
  Chemically synthesized
ggcagauaucgagguggau

SEQ ID NO: 81865 - RNA, 19 nt, Artificial Sequence
  Chemically synthesized
gaaagacaugcuugcucau

SEQ ID NO: 81866 - RNA, 19 nt, Artificial Sequence
  Chemically synthesized
cagcuguggcagaguuaca

SEQ ID NO: 81867 - RNA, 19 nt, Artificial Sequence
  Chemically synthesized
cacgccugaggcaauuaga

SEQ ID NO: 81868 - RNA, 19 nt, Artificial Sequence
  Chemically synthesized
gguggauggaaagcaggua

SEQ ID NO: 81869 - RNA, 19 nt, Artificial Sequence
  Chemically synthesized
aaaugggcucaaccagaaa

SEQ ID NO: 81870 - RNA, 19 nt, Artificial Sequence
  Chemically synthesized
gauggagugagagagguuu

SEQ ID NO: 81871 - RNA, 19 nt, Artificial Sequence
  Chemically synthesized
aagucagauggaaaauuca

SEQ ID NO: 81872 - RNA, 19 nt, Artificial Sequence
  Chemically synthesized
ccugguugggaauaagaag

SEQ ID NO: 81873 - RNA, 19 nt, Artificial Sequence
  Chemically synthesized
ggaagauggcauaaccugu

SEQ ID NO: 81874 - RNA, 19 nt, Artificial Sequence
  Chemically synthesized
aaaccuugcugcaagcaca

SEQ ID NO: 81875 - RNA, 19 nt, Artificial Sequence
  Chemically synthesized
ugcccacaguguuugagaa

SEQ ID NO: 81876 - RNA, 19 nt, Artificial Sequence
  Chemically synthesized
ugggcaggaagauuaugau

SEQ ID NO: 81877 - RNA, 19 nt, Artificial Sequence
  Chemically synthesized
ccuaagauuacaaaucaga

SEQ ID NO: 81878 - RNA, 19 nt, Artificial Sequence
  Chemically synthesized
cuucuugcuucuuucuaga

SEQ ID NO: 81879 - RNA, 19 nt, Artificial Sequence
  Chemically synthesized
gaagauuaugaucgccuga

SEQ ID NO: 81880 - RNA, 19 nt, Artificial Sequence
  Chemically synthesized
caucgacagcccugauagu

SEQ ID NO: 81881 - RNA, 19 nt, Artificial Sequence
  Chemically synthesized
gaguuggcuuugugggaca

SEQ ID NO: 81882 - RNA, 19 nt, Artificial Sequence
  Chemically synthesized
ggaagauuaugaucgccug

SEQ ID NO: 81883 - RNA, 19 nt, Artificial Sequence
  Chemically synthesized
guuugagaacuauguggca

SEQ ID NO: 81884 - RNA, 19 nt, Artificial Sequence
  Chemically synthesized
ggauucguugccugagcaa

SEQ ID NO: 81885 - RNA, 19 nt, Artificial Sequence
  Chemically synthesized
gaaaccugaagaaggcaga

SEQ ID NO: 81886 - RNA, 19 nt, Artificial Sequence
  Chemically synthesized
ccaaguucaugcagcugug

SEQ ID NO: 81887 - RNA, 19 nt, Artificial Sequence
  Chemically synthesized
uuuugaaauggcuacgaga

SEQ ID NO: 81888 - RNA, 19 nt, Artificial Sequence
  Chemically synthesized
ccuaauacugucauccuca

SEQ ID NO: 81889 - RNA, 19 nt, Artificial Sequence
  Chemically synthesized
gcaucuggcucuaauucac

SEQ ID NO: 81890 - RNA, 19 nt, Artificial Sequence
  Chemically synthesized
caguguuugagaacuaugu

SEQ ID NO: 81891 - RNA, 19 nt, Artificial Sequence
  Chemically synthesized
uggcagauaucgaggugga

SEQ ID NO: 81892 - RNA, 19 nt, Artificial Sequence
  Chemically synthesized
uagacgugggaagaaaaaa

SEQ ID NO: 81893 - RNA, 19 nt, Artificial Sequence
  Chemically synthesized
cugggcuaaguaaauagga

SEQ ID NO: 81894 - RNA, 19 nt, Artificial Sequence
  Chemically synthesized
auguguuuuuccaucgaca

SEQ ID NO: 81895 - RNA, 19 nt, Artificial Sequence
  Chemically synthesized
gaaugaugagcacacaagg

SEQ ID NO: 81896 - RNA, 19 nt, Artificial Sequence
  Chemically synthesized
cuauuaucugucagcugca

SEQ ID NO: 81897 - RNA, 19 nt, Artificial Sequence
  Chemically synthesized
uacugucauccucaaagaa

SEQ ID NO: 81898 - RNA, 19 nt, Artificial Sequence
  Chemically synthesized
caucuggcucuaauucaca

SEQ ID NO: 81899 - RNA, 19 nt, Artificial Sequence
  Chemically synthesized
auggagcugggcuaaguaa

SEQ ID NO: 81900 - RNA, 19 nt, Artificial Sequence
  Chemically synthesized
ugcagcuguggcagaguua

SEQ ID NO: 81901 - RNA, 19 nt, Artificial Sequence
  Chemically synthesized
guuucacgccugaggcaau

SEQ ID NO: 81902 - RNA, 19 nt, Artificial Sequence
  Chemically synthesized
gauuacuggccuuuuucau

SEQ ID NO: 81903 - RNA, 19 nt, Artificial Sequence
  Chemically synthesized
guuucauguuaguuaccuu

SEQ ID NO: 81904 - RNA, 19 nt, Artificial Sequence
  Chemically synthesized
uuuugacacugcucuaaca

SEQ ID NO: 81905 - RNA, 19 nt, Artificial Sequence
  Chemically synthesized
cugucagcugcaagguacu

SEQ ID NO: 81906 - RNA, 19 nt, Artificial Sequence
  Chemically synthesized
caucauccugguugggaau

SEQ ID NO: 81907 - RNA, 19 nt, Artificial Sequence
  Chemically synthesized
acugucauccucaaagaaa

SEQ ID NO: 81908 - RNA, 19 nt, Artificial Sequence
  Chemically synthesized
agucagauggaaaauucau

SEQ ID NO: 81909 - RNA, 19 nt, Artificial Sequence
  Chemically synthesized
uguuggugauggagccugu

SEQ ID NO: 81910 - RNA, 19 nt, Artificial Sequence
  Chemically synthesized
ugauuacuggccuuuuuca

SEQ ID NO: 81911 - RNA, 19 nt, Artificial Sequence
  Chemically synthesized
uaauacugucauccucaaa

SEQ ID NO: 81912 - RNA, 19 nt, Artificial Sequence
  Chemically synthesized
cuauguggcagauaucgag

SEQ ID NO: 81913 - RNA, 19 nt, Artificial Sequence
  Chemically synthesized
uagccaagaugaagcagga

SEQ ID NO: 81914 - RNA, 19 nt, Artificial Sequence
  Chemically synthesized
uggauggaaagcagguaga

SEQ ID NO: 81915 - RNA, 19 nt, Artificial Sequence
  Chemically synthesized
gcucuuuucuccucacugu

SEQ ID NO: 81916 - RNA, 19 nt, Artificial Sequence
  Chemically synthesized
ugugguuucauguuaguua

SEQ ID NO: 81917 - RNA, 19 nt, Artificial Sequence
  Chemically synthesized
gugauggagccuguggaaa

SEQ ID NO: 81918 - RNA, 19 nt, Artificial Sequence
  Chemically synthesized
auggagugagagagguuuu

SEQ ID NO: 81919 - RNA, 19 nt, Artificial Sequence
  Chemically synthesized
ggauggaaagcagguagag

SEQ ID NO: 81920 - RNA, 19 nt, Artificial Sequence
  Chemically synthesized
gucagauggaaaauucauu

SEQ ID NO: 81921 - RNA, 19 nt, Artificial Sequence
  Chemically synthesized
cuuaugcgguuaauuuuga

SEQ ID NO: 81922 - RNA, 19 nt, Artificial Sequence
  Chemically synthesized
cugggcaggaagauuauga

SEQ ID NO: 81923 - RNA, 19 nt, Artificial Sequence
  Chemically synthesized
gauuacaaaucagaaguca

SEQ ID NO: 81924 - RNA, 19 nt, Artificial Sequence
  Chemically synthesized
aggaucuucggaaugauga

SEQ ID NO: 81925 - RNA, 19 nt, Artificial Sequence
  Chemically synthesized
uauuaucugucagcugcaa

SEQ ID NO: 81926 - RNA, 19 nt, Artificial Sequence
  Chemically synthesized
cauccugguugggaauaag

SEQ ID NO: 81927 - RNA, 19 nt, Artificial Sequence
  Chemically synthesized
aagcuagacgugggaagaa

SEQ ID NO: 81928 - RNA, 19 nt, Artificial Sequence
  Chemically synthesized
agauaucgagguggaugga

SEQ ID NO: 81929 - RNA, 19 nt, Artificial Sequence
  Chemically synthesized
gcucaaccagaaaagccca

SEQ ID NO: 81930 - RNA, 19 nt, Artificial Sequence
  Chemically synthesized
aaugggcucaaccagaaaa

SEQ ID NO: 81931 - RNA, 19 nt, Artificial Sequence
  Chemically synthesized
cacaguguuugagaacuau

SEQ ID NO: 81932 - RNA, 19 nt, Artificial Sequence
  Chemically synthesized
guggcagaguuacaguucu

SEQ ID NO: 81933 - RNA, 19 nt, Artificial Sequence
  Chemically synthesized
gauaucgagguggauggaa

SEQ ID NO: 81934 - RNA, 19 nt, Artificial Sequence
  Chemically synthesized
gcaggaagauuaugaucgc

SEQ ID NO: 81935 - RNA, 19 nt, Artificial Sequence
  Chemically synthesized
gauggaaagcagguagagu

SEQ ID NO: 81936 - RNA, 19 nt, Artificial Sequence
  Chemically synthesized
uacgagagcugcucugcaa

SEQ ID NO: 81937 - RNA, 19 nt, Artificial Sequence
  Chemically synthesized
cgauguuauacugaugugu

SEQ ID NO: 81938 - RNA, 19 nt, Artificial Sequence
  Chemically synthesized
agguggauggaaagcaggu

SEQ ID NO: 81939 - RNA, 19 nt, Artificial Sequence
  Chemically synthesized
aagguacucuggugaguca

SEQ ID NO: 81940 - RNA, 19 nt, Artificial Sequence
  Chemically synthesized
uagaguuggcuuuguggga

SEQ ID NO: 81941 - RNA, 19 nt, Artificial Sequence
  Chemically synthesized
gaguuacaguucugugguu

SEQ ID NO: 81942 - RNA, 19 nt, Artificial Sequence
  Chemically synthesized
acucggauucguugccuga

SEQ ID NO: 81943 - RNA, 19 nt, Artificial Sequence
  Chemically synthesized
acuauguggcagauaucga

SEQ ID NO: 81944 - RNA, 19 nt, Artificial Sequence
  Chemically synthesized
cugcaagguacucugguga

SEQ ID NO: 81945 - RNA, 19 nt, Artificial Sequence
  Chemically synthesized
gguagaguuggcuuugugg

SEQ ID NO: 81946 - RNA, 19 nt, Artificial Sequence
  Chemically synthesized
agccggugaaaccugaaga

SEQ ID NO: 81947 - RNA, 19 nt, Artificial Sequence
  Chemically synthesized
uaucgagguggauggaaag

SEQ ID NO: 81948 - RNA, 19 nt, Artificial Sequence
  Chemically synthesized
gauggcauaaccugucuca

SEQ ID NO: 81949 - RNA, 19 nt, Artificial Sequence
  Chemically synthesized
guuuugucacuuuuucuga

SEQ ID NO: 81950 - RNA, 19 nt, Artificial Sequence
  Chemically synthesized
cuugugaaaccuugcugca

SEQ ID NO: 81951 - RNA, 19 nt, Artificial Sequence
  Chemically synthesized
gagaacuauguggcagaua

SEQ ID NO: 81952 - RNA, 19 nt, Artificial Sequence
  Chemically synthesized
auaccgauguuauacugau

SEQ ID NO: 81953 - RNA, 19 nt, Artificial Sequence
  Chemically synthesized
gacacuuuggaagauggca

SEQ ID NO: 81954 - RNA, 19 nt, Artificial Sequence
  Chemically synthesized
aagauggagugagagaggu

SEQ ID NO: 81955 - RNA, 19 nt, Artificial Sequence
  Chemically synthesized
gauaccgauguuauacuga

SEQ ID NO: 81956 - RNA, 19 nt, Artificial Sequence
  Chemically synthesized
ccuguggaaagacaugcuu

SEQ ID NO: 81957 - RNA, 19 nt, Artificial Sequence
  Chemically synthesized
ugacacaccaggcgcuaau

SEQ ID NO: 81958 - RNA, 19 nt, Artificial Sequence
  Chemically synthesized
cacaccaggcgcuaauuca

SEQ ID NO: 81959 - RNA, 19 nt, Artificial Sequence
  Chemically synthesized
ucuccuacccagauaccga

SEQ ID NO: 81960 - RNA, 19 nt, Artificial Sequence
  Chemically synthesized
acuuuggaagauggcauaa

SEQ ID NO: 81961 - RNA, 19 nt, Artificial Sequence
  Chemically synthesized
gugguuucauguuaguuac

SEQ ID NO: 81962 - RNA, 19 nt, Artificial Sequence
  Chemically synthesized
ggcucuaauucacagugcu

SEQ ID NO: 81963 - RNA, 19 nt, Artificial Sequence
  Chemically synthesized
agcaaagaccaaagaugga

SEQ ID NO: 81964 - RNA, 19 nt, Artificial Sequence
  Chemically synthesized
uaugauuacuggccuuuuu

SEQ ID NO: 81965 - RNA, 19 nt, Artificial Sequence
  Chemically synthesized
uacugauguguuuuuccau

SEQ ID NO: 81966 - RNA, 19 nt, Artificial Sequence
  Chemically synthesized
acccagauaccgauguuau

SEQ ID NO: 81967 - RNA, 19 nt, Artificial Sequence
  Chemically synthesized
uggagccuguggaaagaca

SEQ ID NO: 81968 - RNA, 19 nt, Artificial Sequence
  Chemically synthesized
accaguucccagaggugua

SEQ ID NO: 81969 - RNA, 19 nt, Artificial Sequence
  Chemically synthesized
auuuagaagccaacuauga

SEQ ID NO: 81970 - RNA, 19 nt, Artificial Sequence
  Chemically synthesized
aaaucugggugccuugucu

SEQ ID NO: 81971 - RNA, 19 nt, Artificial Sequence
  Chemically synthesized
caccaggcgcuaauucaag

SEQ ID NO: 81972 - RNA, 19 nt, Artificial Sequence
  Chemically synthesized
aguucaugcagcuguggca

SEQ ID NO: 81973 - RNA, 19 nt, Artificial Sequence
  Chemically synthesized
uuuagaagccaacuaugau

SEQ ID NO: 81974 - RNA, 19 nt, Artificial Sequence
  Chemically synthesized
cucucuucucuccagcuga

SEQ ID NO: 81975 - RNA, 19 nt, Artificial Sequence
  Chemically synthesized
cuucucuccagcugacuaa

SEQ ID NO: 81976 - RNA, 19 nt, Artificial Sequence
  Chemically synthesized
aauuagacacuuuggaaga

SEQ ID NO: 81977 - RNA, 19 nt, Artificial Sequence
  Chemically synthesized
cugccauccggaagaaacu

SEQ ID NO: 81978 - RNA, 19 nt, Artificial Sequence
  Chemically synthesized
acgugggaagaaaaaaucu

SEQ ID NO: 81979 - RNA, 19 nt, Artificial Sequence
  Chemically synthesized
ccggaagaaacuggugauu

SEQ ID NO: 81980 - RNA, 19 nt, Artificial Sequence
  Chemically synthesized
uugugaaaccuugcugcaa

SEQ ID NO: 81981 - RNA, 19 nt, Artificial Sequence
  Chemically synthesized
uguccugccuauuaucugu

SEQ ID NO: 81982 - RNA, 19 nt, Artificial Sequence
  Chemically synthesized
cagguagaguuggcuuugu

SEQ ID NO: 81983 - RNA, 19 nt, Artificial Sequence
  Chemically synthesized
ucuucucuccagcugacua

SEQ ID NO: 81984 - RNA, 19 nt, Artificial Sequence
  Chemically synthesized
uuaagcaucuggcucuaau

SEQ ID NO: 81985 - RNA, 19 nt, Artificial Sequence
  Chemically synthesized
cggugaaaccugaagaagg

SEQ ID NO: 81986 - RNA, 19 nt, Artificial Sequence
  Chemically synthesized
caguauuuagaagccaacu

SEQ ID NO: 81987 - RNA, 19 nt, Artificial Sequence
  Chemically synthesized
gaauaagaaggaucuucgg

SEQ ID NO: 81988 - RNA, 19 nt, Artificial Sequence
  Chemically synthesized
accuaagauuacaaaucag

SEQ ID NO: 81989 - RNA, 19 nt, Artificial Sequence
  Chemically synthesized
uugagaacuauguggcaga

SEQ ID NO: 81990 - RNA, 19 nt, Artificial Sequence
  Chemically synthesized
caguucugugguuucaugu

SEQ ID NO: 81991 - RNA, 19 nt, Artificial Sequence
  Chemically synthesized
ugauguguuuuuccaucga

SEQ ID NO: 81992 - RNA, 19 nt, Artificial Sequence
  Chemically synthesized
aucugucagcugcaaggua

SEQ ID NO: 81993 - RNA, 19 nt, Artificial Sequence
  Chemically synthesized
acuucuugcuucuuucuag

SEQ ID NO: 81994 - RNA, 19 nt, Artificial Sequence
  Chemically synthesized
acagcugggcaggaagauu

SEQ ID NO: 81995 - RNA, 19 nt, Artificial Sequence
  Chemically synthesized
cuucggaaugaugagcaca

SEQ ID NO: 81996 - RNA, 19 nt, Artificial Sequence
  Chemically synthesized
acuaacauguccugccuau

SEQ ID NO: 81997 - RNA, 19 nt, Artificial Sequence
  Chemically synthesized
agauuaugaucgccugagg

SEQ ID NO: 81998 - RNA, 19 nt, Artificial Sequence
  Chemically synthesized
guguaugugcccacagugu

SEQ ID NO: 81999 - RNA, 19 nt, Artificial Sequence
  Chemically synthesized
caccaggguccuuuugaca

SEQ ID NO: 82000 - RNA, 19 nt, Artificial Sequence
  Chemically synthesized
uggagugagagagguuuuu

SEQ ID NO: 82001 - RNA, 19 nt, Artificial Sequence
  Chemically synthesized
cuuaagcaucuggcucuaa

SEQ ID NO: 82002 - RNA, 19 nt, Artificial Sequence
  Chemically synthesized
gagccuguggaaagacaug

SEQ ID NO: 82003 - RNA, 19 nt, Artificial Sequence
  Chemically synthesized
cacagugcucuuuucuccu

SEQ ID NO: 82004 - RNA, 19 nt, Artificial Sequence
  Chemically synthesized
cagauaccgauguuauacu

SEQ ID NO: 82005 - RNA, 19 nt, Artificial Sequence
  Chemically synthesized
cuaacauguccugccuauu

SEQ ID NO: 82006 - RNA, 19 nt, Artificial Sequence
  Chemically synthesized
uuaaauucccguuuuguca

SEQ ID NO: 82007 - RNA, 19 nt, Artificial Sequence
  Chemically synthesized
ucugugguuucauguuagu

SEQ ID NO: 82008 - RNA, 19 nt, Artificial Sequence
  Chemically synthesized
gggcaggaagauuaugauc

SEQ ID NO: 82009 - RNA, 19 nt, Artificial Sequence
  Chemically synthesized
aagaccaaagauggaguga

SEQ ID NO: 82010 - RNA, 19 nt, Artificial Sequence
  Chemically synthesized
aguucugugguuucauguu

SEQ ID NO: 82011 - RNA, 19 nt, Artificial Sequence
  Chemically synthesized
ucaccacuucagggcuuua

SEQ ID NO: 82012 - RNA, 19 nt, Artificial Sequence
  Chemically synthesized
auacugauguguuuuucca

SEQ ID NO: 82013 - RNA, 19 nt, Artificial Sequence
  Chemically synthesized
cucuccagcugacuaaacu

SEQ ID NO: 82014 - RNA, 19 nt, Artificial Sequence
  Chemically synthesized
gauucguugccugagcaau

SEQ ID NO: 82015 - RNA, 19 nt, Artificial Sequence
  Chemically synthesized
gugcccacaguguuugaga

SEQ ID NO: 82016 - RNA, 19 nt, Artificial Sequence
  Chemically synthesized
cuggugagucaccacuuca

SEQ ID NO: 82017 - RNA, 19 nt, Artificial Sequence
  Chemically synthesized
uaagcaucuggcucuaauu

SEQ ID NO: 82018 - RNA, 19 nt, Artificial Sequence
  Chemically synthesized
agguagaguuggcuuugug

SEQ ID NO: 82019 - RNA, 19 nt, Artificial Sequence
  Chemically synthesized
gugggaagaaaaaaucugg

SEQ ID NO: 82020 - RNA, 19 nt, Artificial Sequence
  Chemically synthesized
ugcaagcuagacgugggaa

SEQ ID NO: 82021 - RNA, 19 nt, Artificial Sequence
  Chemically synthesized
cuccuacccagauaccgau

SEQ ID NO: 82022 - RNA, 19 nt, Artificial Sequence
  Chemically synthesized
ggugaaaccugaagaaggc

SEQ ID NO: 82023 - RNA, 19 nt, Artificial Sequence
  Chemically synthesized
ccgauguuauacugaugug

SEQ ID NO: 82024 - RNA, 19 nt, Artificial Sequence
  Chemically synthesized
caagcauuucugucccaac

SEQ ID NO: 82025 - RNA, 19 nt, Artificial Sequence
  Chemically synthesized
ucuucggaaugaugagcac

SEQ ID NO: 82026 - RNA, 19 nt, Artificial Sequence
  Chemically synthesized
aggagccaccaguucucau

SEQ ID NO: 82027 - RNA, 19 nt, Artificial Sequence
  Chemically synthesized
ucucguuaguccacggucu

SEQ ID NO: 82028 - RNA, 19 nt, Artificial Sequence
  Chemically synthesized
agcugggcuaaguaaauag

SEQ ID NO: 82029 - RNA, 19 nt, Artificial Sequence
  Chemically synthesized
gcaagguacucuggugagu

SEQ ID NO: 82030 - RNA, 19 nt, Artificial Sequence
  Chemically synthesized
auggaaagcagguagaguu

SEQ ID NO: 82031 - RNA, 19 nt, Artificial Sequence
  Chemically synthesized
acauguccugccuauuauc

SEQ ID NO: 82032 - RNA, 19 nt, Artificial Sequence
  Chemically synthesized
aguucucauggguggcacu

SEQ ID NO: 82033 - RNA, 19 nt, Artificial Sequence
  Chemically synthesized
gcuguggcagaguuacagu

SEQ ID NO: 82034 - RNA, 19 nt, Artificial Sequence
  Chemically synthesized
ucuuuucuccucacuguau

SEQ ID NO: 82035 - RNA, 19 nt, Artificial Sequence
  Chemically synthesized
ucuccagcugacuaaacuu

SEQ ID NO: 82036 - RNA, 19 nt, Artificial Sequence
  Chemically synthesized
cuuuacuccguaacagauu

SEQ ID NO: 82037 - RNA, 19 nt, Artificial Sequence
  Chemically synthesized
uucagggcuuuacuccgua

SEQ ID NO: 82038 - RNA, 19 nt, Artificial Sequence
  Chemically synthesized
auaaccugucucaccugga

SEQ ID NO: 82039 - RNA, 19 nt, Artificial Sequence
  Chemically synthesized
guggauggaaagcagguag

SEQ ID NO: 82040 - RNA, 19 nt, Artificial Sequence
  Chemically synthesized
uucugauaaaagauggcca

SEQ ID NO: 82041 - RNA, 19 nt, Artificial Sequence
  Chemically synthesized
aucagaagucaucuugcua

SEQ ID NO: 82042 - RNA, 19 nt, Artificial Sequence
  Chemically synthesized
agaagucaucuugcuacca

SEQ ID NO: 82043 - RNA, 19 nt, Artificial Sequence
  Chemically synthesized
cuugcuucuuucuagaaag

SEQ ID NO: 82044 - RNA, 19 nt, Artificial Sequence
  Chemically synthesized
gguucucucguuaguccac

SEQ ID NO: 82045 - RNA, 19 nt, Artificial Sequence
  Chemically synthesized
gcugggcaggaagauuaug

SEQ ID NO: 82046 - RNA, 19 nt, Artificial Sequence
  Chemically synthesized
gagagguuuuugaaauggc

SEQ ID NO: 82047 - RNA, 19 nt, Artificial Sequence
  Chemically synthesized
gcugggcuaaguaaauagg

SEQ ID NO: 82048 - RNA, 19 nt, Artificial Sequence
  Chemically synthesized
gccuguggaaagacaugcu

SEQ ID NO: 82049 - RNA, 19 nt, Artificial Sequence
  Chemically synthesized
agcugcaagguacucuggu

SEQ ID NO: 82050 - RNA, 19 nt, Artificial Sequence
  Chemically synthesized
uguaugugcccacaguguu

SEQ ID NO: 82051 - RNA, 19 nt, Artificial Sequence
  Chemically synthesized
aaaagcccaaguucaugca

SEQ ID NO: 82052 - RNA, 19 nt, Artificial Sequence
  Chemically synthesized
acaguucugugguuucaug

SEQ ID NO: 82053 - RNA, 19 nt, Artificial Sequence
  Chemically synthesized
gaaagcagguagaguuggc

SEQ ID NO: 82054 - RNA, 19 nt, Artificial Sequence
  Chemically synthesized
aaaaaaucugggugccuug

SEQ ID NO: 82055 - RNA, 19 nt, Artificial Sequence
  Chemically synthesized
guuuuugaaauggcuacga

SEQ ID NO: 82056 - RNA, 19 nt, Artificial Sequence
  Chemically synthesized
cagauaucgagguggaugg

SEQ ID NO: 82057 - RNA, 19 nt, Artificial Sequence
  Chemically synthesized
cuguggaaagacaugcuug

SEQ ID NO: 82058 - RNA, 19 nt, Artificial Sequence
  Chemically synthesized
gaagucaucuugcuaccag

SEQ ID NO: 82059 - RNA, 19 nt, Artificial Sequence
  Chemically synthesized
acuccguaacagauuuugu

SEQ ID NO: 82060 - RNA, 19 nt, Artificial Sequence
  Chemically synthesized
agaaaacaucccagaaaag

SEQ ID NO: 82061 - RNA, 19 nt, Artificial Sequence
  Chemically synthesized
uauuuagaagccaacuaug

SEQ ID NO: 82062 - RNA, 19 nt, Artificial Sequence
  Chemically synthesized
uucucuccagcugacuaaa

SEQ ID NO: 82063 - RNA, 19 nt, Artificial Sequence
  Chemically synthesized
uguguuuuuccaucgacag

SEQ ID NO: 82064 - RNA, 19 nt, Artificial Sequence
  Chemically synthesized
acgccugaggcaauuagac

SEQ ID NO: 82065 - RNA, 19 nt, Artificial Sequence
  Chemically synthesized
ccggugaaaccugaagaag

SEQ ID NO: 82066 - RNA, 19 nt, Artificial Sequence
  Chemically synthesized
cuuuugacacugcucuaac

SEQ ID NO: 82067 - RNA, 19 nt, Artificial Sequence
  Chemically synthesized
uggaaagcagguagaguug

SEQ ID NO: 82068 - RNA, 19 nt, Artificial Sequence
  Chemically synthesized
ucgagguggauggaaagca

SEQ ID NO: 82069 - RNA, 19 nt, Artificial Sequence
  Chemically synthesized
ccagauaccgauguuauac

SEQ ID NO: 82070 - RNA, 19 nt, Artificial Sequence
  Chemically synthesized
cccaaguucaugcagcugu

SEQ ID NO: 82071 - RNA, 19 nt, Artificial Sequence
  Chemically synthesized
gacacaccaggcgcuaauu

SEQ ID NO: 82072 - RNA, 19 nt, Artificial Sequence
  Chemically synthesized
aggcaauuagacacuuugg

SEQ ID NO: 82073 - RNA, 19 nt, Artificial Sequence
  Chemically synthesized
cagcaaagaccaaagaugg

SEQ ID NO: 82074 - RNA, 19 nt, Artificial Sequence
  Chemically synthesized
gacagcccugauaguuuag

SEQ ID NO: 82075 - RNA, 19 nt, Artificial Sequence
  Chemically synthesized
aaaacaucccagaaaagug

SEQ ID NO: 82076 - RNA, 19 nt, Artificial Sequence
  Chemically synthesized
cacuguauccagguucccu

SEQ ID NO: 82077 - RNA, 19 nt, Artificial Sequence
  Chemically synthesized
aaucugggugccuugucuu

SEQ ID NO: 82078 - RNA, 19 nt, Artificial Sequence
  Chemically synthesized
gauuguuggugauggagcc

SEQ ID NO: 82079 - RNA, 19 nt, Artificial Sequence
  Chemically synthesized
uugggaauaagaaggaucu

SEQ ID NO: 82080 - RNA, 19 nt, Artificial Sequence
  Chemically synthesized
aauaagaaggaucuucgga

SEQ ID NO: 82081 - RNA, 19 nt, Artificial Sequence
  Chemically synthesized
cugugguuucauguuaguu

SEQ ID NO: 82082 - RNA, 19 nt, Artificial Sequence
  Chemically synthesized
aauucacagugcucuuuuc

SEQ ID NO: 82083 - RNA, 19 nt, Artificial Sequence
  Chemically synthesized
uggugagucaccacuucag

SEQ ID NO: 82084 - RNA, 19 nt, Artificial Sequence
  Chemically synthesized
uucugugguuucauguuag

SEQ ID NO: 82085 - RNA, 19 nt, Artificial Sequence
  Chemically synthesized
cuguggcagaguuacaguu

SEQ ID NO: 82086 - RNA, 19 nt, Artificial Sequence
  Chemically synthesized
aaggaucuucggaaugaug

SEQ ID NO: 82087 - RNA, 19 nt, Artificial Sequence
  Chemically synthesized
gauuuuguuggcauagcuc

SEQ ID NO: 82088 - RNA, 19 nt, Artificial Sequence
  Chemically synthesized
auuacuggccuuuuucauu

SEQ ID NO: 82089 - RNA, 19 nt, Artificial Sequence
  Chemically synthesized
gcagauaucgagguggaug

SEQ ID NO: 82090 - RNA, 19 nt, Artificial Sequence
  Chemically synthesized
ggcagaguuacaguucugu

SEQ ID NO: 82091 - RNA, 19 nt, Artificial Sequence
  Chemically synthesized
aacuucuugcuucuuucua

SEQ ID NO: 82092 - RNA, 19 nt, Artificial Sequence
  Chemically synthesized
ugugaaaccuugcugcaag

SEQ ID NO: 82093 - RNA, 19 nt, Artificial Sequence
  Chemically synthesized
caguuuuuugaaaaugggc

SEQ ID NO: 82094 - RNA, 19 nt, Artificial Sequence
  Chemically synthesized
augugcccacaguguuuga

SEQ ID NO: 82095 - RNA, 19 nt, Artificial Sequence
  Chemically synthesized
cccagaagucaagcauuuc

SEQ ID NO: 82096 - RNA, 19 nt, Artificial Sequence
  Chemically synthesized
gugcucuuuucuccucacu

SEQ ID NO: 82097 - RNA, 19 nt, Artificial Sequence
  Chemically synthesized
uguggaaagacaugcuugc

SEQ ID NO: 82098 - RNA, 19 nt, Artificial Sequence
  Chemically synthesized
agaaaagcccaaguucaug

SEQ ID NO: 82099 - RNA, 19 nt, Artificial Sequence
  Chemically synthesized
guggaaagacaugcuugcu

SEQ ID NO: 82100 - RNA, 19 nt, Artificial Sequence
  Chemically synthesized
auccugguugggaauaaga

SEQ ID NO: 82101 - RNA, 19 nt, Artificial Sequence
  Chemically synthesized
uaccgauguuauacugaug

SEQ ID NO: 82102 - RNA, 19 nt, Artificial Sequence
  Chemically synthesized
aguguuugagaacuaugug

SEQ ID NO: 82103 - RNA, 19 nt, Artificial Sequence
  Chemically synthesized
aauaggaauugguuucacg

SEQ ID NO: 82104 - RNA, 19 nt, Artificial Sequence
  Chemically synthesized
agcaucuggcucuaauuca

SEQ ID NO: 82105 - RNA, 19 nt, Artificial Sequence
  Chemically synthesized
auuagacacuuuggaagau

SEQ ID NO: 82106 - RNA, 19 nt, Artificial Sequence
  Chemically synthesized
acagcccugauaguuuaga

SEQ ID NO: 82107 - RNA, 19 nt, Artificial Sequence
  Chemically synthesized
uucucauggguggcacuca

SEQ ID NO: 82108 - RNA, 19 nt, Artificial Sequence
  Chemically synthesized
gucaagcauuucuguccca

SEQ ID NO: 82109 - RNA, 19 nt, Artificial Sequence
  Chemically synthesized
ccuauuaucugucagcugc

SEQ ID NO: 82110 - RNA, 19 nt, Artificial Sequence
  Chemically synthesized
accacuucagggcuuuacu

SEQ ID NO: 82111 - RNA, 19 nt, Artificial Sequence
  Chemically synthesized
cuugucuugugaaaccuug

SEQ ID NO: 82112 - RNA, 19 nt, Artificial Sequence
  Chemically synthesized
gugaaaccugaagaaggca

SEQ ID NO: 82113 - RNA, 19 nt, Artificial Sequence
  Chemically synthesized
aagauggcauaaccugucu

SEQ ID NO: 82114 - RNA, 19 nt, Artificial Sequence
  Chemically synthesized
aguuuuuugaaaaugggcu

SEQ ID NO: 82115 - RNA, 19 nt, Artificial Sequence
  Chemically synthesized
gucucucuucucuccagcu

SEQ ID NO: 82116 - RNA, 19 nt, Artificial Sequence
  Chemically synthesized
uugaaaaugggcucaacca

SEQ ID NO: 82117 - RNA, 19 nt, Artificial Sequence
  Chemically synthesized
ugucauccucaaagaaagu

SEQ ID NO: 82118 - RNA, 19 nt, Artificial Sequence
  Chemically synthesized
cauccggaagaaacuggug

SEQ ID NO: 82119 - RNA, 19 nt, Artificial Sequence
  Chemically synthesized
aguucccagagguguaugu

SEQ ID NO: 82120 - RNA, 19 nt, Artificial Sequence
  Chemically synthesized
ugaaaaugggcucaaccag

SEQ ID NO: 82121 - RNA, 19 nt, Artificial Sequence
  Chemically synthesized
accaggcgcuaauucaagg

SEQ ID NO: 82122 - RNA, 19 nt, Artificial Sequence
  Chemically synthesized
uggacuuaagcaucuggcu

SEQ ID NO: 82123 - RNA, 19 nt, Artificial Sequence
  Chemically synthesized
ucuaauucacagugcucuu

SEQ ID NO: 82124 - RNA, 19 nt, Artificial Sequence
  Chemically synthesized
acuaauagaauaaaggcag

SEQ ID NO: 82125 - RNA, 19 nt, Artificial Sequence
  Chemically synthesized
ugggaagaaaaaaucuggg

SEQ ID NO: 82126 - RNA, 19 nt, Artificial Sequence
  Chemically synthesized
gaagauggcauaaccuguc

SEQ ID NO: 82127 - RNA, 19 nt, Artificial Sequence
  Chemically synthesized
ucugucagcugcaagguac

SEQ ID NO: 82128 - RNA, 19 nt, Artificial Sequence
  Chemically synthesized
auccggaagaaacugguga

SEQ ID NO: 82129 - RNA, 19 nt, Artificial Sequence
  Chemically synthesized
uugcuucuuucuagaaaga

SEQ ID NO: 82130 - RNA, 19 nt, Artificial Sequence
  Chemically synthesized
agaaaaaaucugggugccu

SEQ ID NO: 82131 - RNA, 19 nt, Artificial Sequence
  Chemically synthesized
ugcucugcaagcuagacgu

SEQ ID NO: 82132 - RNA, 19 nt, Artificial Sequence
  Chemically synthesized
uuacaguucugugguuuca

SEQ ID NO: 82133 - RNA, 19 nt, Artificial Sequence
  Chemically synthesized
guuaauuuugaagugcugu

SEQ ID NO: 82134 - RNA, 19 nt, Artificial Sequence
  Chemically synthesized
acuuuuuuucuguaccagu

SEQ ID NO: 82135 - RNA, 19 nt, Artificial Sequence
  Chemically synthesized
cauguccugccuauuaucu

SEQ ID NO: 82136 - RNA, 19 nt, Artificial Sequence
  Chemically synthesized
uaauucacagugcucuuuu

SEQ ID NO: 82137 - RNA, 19 nt, Artificial Sequence
  Chemically synthesized
agucaccacuucagggcuu

SEQ ID NO: 82138 - RNA, 19 nt, Artificial Sequence
  Chemically synthesized
ccuuaugcgguuaauuuug

SEQ ID NO: 82139 - RNA, 19 nt, Artificial Sequence
  Chemically synthesized
cuuuucuccucacuguauc

SEQ ID NO: 82140 - RNA, 19 nt, Artificial Sequence
  Chemically synthesized
uagacacuuuggaagaugg

SEQ ID NO: 82141 - RNA, 19 nt, Artificial Sequence
  Chemically synthesized
uaaaagauggccauauuac

SEQ ID NO: 82142 - RNA, 19 nt, Artificial Sequence
  Chemically synthesized
accagaaaagcccaaguuc

SEQ ID NO: 82143 - RNA, 19 nt, Artificial Sequence
  Chemically synthesized
uucuuaacuucuugcuucu

SEQ ID NO: 82144 - RNA, 19 nt, Artificial Sequence
  Chemically synthesized
ccuacccagauaccgaugu

SEQ ID NO: 82145 - RNA, 19 nt, Artificial Sequence
  Chemically synthesized
ucuggugagucaccacuuc

SEQ ID NO: 82146 - RNA, 19 nt, Artificial Sequence
  Chemically synthesized
guuggcuuugugggacaca

SEQ ID NO: 82147 - RNA, 19 nt, Artificial Sequence
  Chemically synthesized
ggaaagcagguagaguugg

SEQ ID NO: 82148 - RNA, 19 nt, Artificial Sequence
  Chemically synthesized
cuacuaauagaauaaaggc

SEQ ID NO: 82149 - RNA, 19 nt, Artificial Sequence
  Chemically synthesized
uuuacuccguaacagauuu

SEQ ID NO: 82150 - RNA, 19 nt, Artificial Sequence
  Chemically synthesized
aaagcagguagaguuggcu

SEQ ID NO: 82151 - RNA, 19 nt, Artificial Sequence
  Chemically synthesized
uuaacuucuugcuucuuuc

SEQ ID NO: 82152 - RNA, 19 nt, Artificial Sequence
  Chemically synthesized
guugggaauaagaaggauc

SEQ ID NO: 82153 - RNA, 19 nt, Artificial Sequence
  Chemically synthesized
cuuuggaagauggcauaac

SEQ ID NO: 82154 - RNA, 19 nt, Artificial Sequence
  Chemically synthesized
gucaccacuucagggcuuu

SEQ ID NO: 82155 - RNA, 19 nt, Artificial Sequence
  Chemically synthesized
uuuuugaaauggcuacgag

SEQ ID NO: 82156 - RNA, 19 nt, Artificial Sequence
  Chemically synthesized
cccacaguguuugagaacu

SEQ ID NO: 82157 - RNA, 19 nt, Artificial Sequence
  Chemically synthesized
gguuuuugaaauggcuacg

SEQ ID NO: 82158 - RNA, 19 nt, Artificial Sequence
  Chemically synthesized
uggaagauggcauaaccug

SEQ ID NO: 82159 - RNA, 19 nt, Artificial Sequence
  Chemically synthesized
auuuuguuggcauagcucu

SEQ ID NO: 82160 - RNA, 19 nt, Artificial Sequence
  Chemically synthesized
aaaagauggccauauuacc

SEQ ID NO: 82161 - RNA, 19 nt, Artificial Sequence
  Chemically synthesized
aauacugucauccucaaag

SEQ ID NO: 82162 - RNA, 19 nt, Artificial Sequence
  Chemically synthesized
auucguugccugagcaaug

SEQ ID NO: 82163 - RNA, 19 nt, Artificial Sequence
  Chemically synthesized
uuuccaucgacagcccuga

SEQ ID NO: 82164 - RNA, 19 nt, Artificial Sequence
  Chemically synthesized
cugguugggaauaagaagg

SEQ ID NO: 82165 - RNA, 19 nt, Artificial Sequence
  Chemically synthesized
auccucaaagaaaguguau

SEQ ID NO: 82166 - RNA, 19 nt, Artificial Sequence
  Chemically synthesized
guguuugagaacuaugugg

SEQ ID NO: 82167 - RNA, 19 nt, Artificial Sequence
  Chemically synthesized
uuggauuuccuaauacugu

SEQ ID NO: 82168 - RNA, 19 nt, Artificial Sequence
  Chemically synthesized
gugaaaccuugcugcaagc

SEQ ID NO: 82169 - RNA, 19 nt, Artificial Sequence
  Chemically synthesized
uuccaucgacagcccugau

SEQ ID NO: 82170 - RNA, 19 nt, Artificial Sequence
  Chemically synthesized
ucugggugccuugucuugu

SEQ ID NO: 82171 - RNA, 19 nt, Artificial Sequence
  Chemically synthesized
uacccagauaccgauguua

SEQ ID NO: 82172 - RNA, 19 nt, Artificial Sequence
  Chemically synthesized
cuucagggcuuuacuccgu

SEQ ID NO: 82173 - RNA, 19 nt, Artificial Sequence
  Chemically synthesized
aaaaaucugggugccuugu

SEQ ID NO: 82174 - RNA, 19 nt, Artificial Sequence
  Chemically synthesized
gguccuuuugacacugcuc

SEQ ID NO: 82175 - RNA, 19 nt, Artificial Sequence
  Chemically synthesized
guagaguuggcuuuguggg

SEQ ID NO: 82176 - RNA, 19 nt, Artificial Sequence
  Chemically synthesized
aagaggcuggacucggauu

SEQ ID NO: 82177 - RNA, 19 nt, Artificial Sequence
  Chemically synthesized
uauaacaucgguaucuggg

SEQ ID NO: 82178 - RNA, 19 nt, Artificial Sequence
  Chemically synthesized
uuggacaucguuaauaauc

SEQ ID NO: 82179 - RNA, 19 nt, Artificial Sequence
  Chemically synthesized
cucucucacuccaucuuug

SEQ ID NO: 82180 - RNA, 19 nt, Artificial Sequence
  Chemically synthesized
uuccuauuuacuuagccca

SEQ ID NO: 82181 - RNA, 19 nt, Artificial Sequence
  Chemically synthesized
uuucaaaaaccucucucac

SEQ ID NO: 82182 - RNA, 19 nt, Artificial Sequence
  Chemically synthesized
uacuuagcccagcuccaug

SEQ ID NO: 82183 - RNA, 19 nt, Artificial Sequence
  Chemically synthesized
ugagcaagcaugucuuucc

SEQ ID NO: 82184 - RNA, 19 nt, Artificial Sequence
  Chemically synthesized
uucuucagguuucaccggc

SEQ ID NO: 82185 - RNA, 19 nt, Artificial Sequence
  Chemically synthesized
uuuacuuagcccagcucca

SEQ ID NO: 82186 - RNA, 19 nt, Artificial Sequence
  Chemically synthesized
uuuccauccaccucgauau

SEQ ID NO: 82187 - RNA, 19 nt, Artificial Sequence
  Chemically synthesized
ccucucucacuccaucuuu

SEQ ID NO: 82188 - RNA, 19 nt, Artificial Sequence
  Chemically synthesized
uucaaaaaccucucucacu

SEQ ID NO: 82189 - RNA, 19 nt, Artificial Sequence
  Chemically synthesized
ucugguugagcccauuuuc

SEQ ID NO: 82190 - RNA, 19 nt, Artificial Sequence
  Chemically synthesized
augucuuuccacaggcucc

SEQ ID NO: 82191 - RNA, 19 nt, Artificial Sequence
  Chemically synthesized
auaaucuuccugcccagcu

SEQ ID NO: 82192 - RNA, 19 nt, Artificial Sequence
  Chemically synthesized
auccaccucgauaucugcc

SEQ ID NO: 82193 - RNA, 19 nt, Artificial Sequence
  Chemically synthesized
augagcaagcaugucuuuc

SEQ ID NO: 82194 - RNA, 19 nt, Artificial Sequence
  Chemically synthesized
uguaacucugccacagcug

SEQ ID NO: 82195 - RNA, 19 nt, Artificial Sequence
  Chemically synthesized
ucuaauugccucaggcgug

SEQ ID NO: 82196 - RNA, 19 nt, Artificial Sequence
  Chemically synthesized
uaccugcuuuccauccacc

SEQ ID NO: 82197 - RNA, 19 nt, Artificial Sequence
  Chemically synthesized
uuucugguugagcccauuu

SEQ ID NO: 82198 - RNA, 19 nt, Artificial Sequence
  Chemically synthesized
aaaccucucucacuccauc

SEQ ID NO: 82199 - RNA, 19 nt, Artificial Sequence
  Chemically synthesized
ugaauuuuccaucugacuu

SEQ ID NO: 82200 - RNA, 19 nt, Artificial Sequence
  Chemically synthesized
cuucuuauucccaaccagg

SEQ ID NO: 82201 - RNA, 19 nt, Artificial Sequence
  Chemically synthesized
acagguuaugccaucuucc

SEQ ID NO: 82202 - RNA, 19 nt, Artificial Sequence
  Chemically synthesized
ugugcuugcagcaagguuu

SEQ ID NO: 82203 - RNA, 19 nt, Artificial Sequence
  Chemically synthesized
uucucaaacacugugggca

SEQ ID NO: 82204 - RNA, 19 nt, Artificial Sequence
  Chemically synthesized
aucauaaucuuccugccca

SEQ ID NO: 82205 - RNA, 19 nt, Artificial Sequence
  Chemically synthesized
ucugauuuguaaucuuagg

SEQ ID NO: 82206 - RNA, 19 nt, Artificial Sequence
  Chemically synthesized
ucuagaaagaagcaagaag

SEQ ID NO: 82207 - RNA, 19 nt, Artificial Sequence
  Chemically synthesized
ucaggcgaucauaaucuuc

SEQ ID NO: 82208 - RNA, 19 nt, Artificial Sequence
  Chemically synthesized
acuaucagggcugucgaug

SEQ ID NO: 82209 - RNA, 19 nt, Artificial Sequence
  Chemically synthesized
ugucccacaaagccaacuc

SEQ ID NO: 82210 - RNA, 19 nt, Artificial Sequence
  Chemically synthesized
caggcgaucauaaucuucc

SEQ ID NO: 82211 - RNA, 19 nt, Artificial Sequence
  Chemically synthesized
ugccacauaguucucaaac

SEQ ID NO: 82212 - RNA, 19 nt, Artificial Sequence
  Chemically synthesized
uugcucaggcaacgaaucc

SEQ ID NO: 82213 - RNA, 19 nt, Artificial Sequence
  Chemically synthesized
ucugccuucuucagguuuc

SEQ ID NO: 82214 - RNA, 19 nt, Artificial Sequence
  Chemically synthesized
cacagcugcaugaacuugg

SEQ ID NO: 82215 - RNA, 19 nt, Artificial Sequence
  Chemically synthesized
ucucguagccauuucaaaa

SEQ ID NO: 82216 - RNA, 19 nt, Artificial Sequence
  Chemically synthesized
ugaggaugacaguauuagg

SEQ ID NO: 82217 - RNA, 19 nt, Artificial Sequence
  Chemically synthesized
gugaauuagagccagaugc

SEQ ID NO: 82218 - RNA, 19 nt, Artificial Sequence
  Chemically synthesized
acauaguucucaaacacug

SEQ ID NO: 82219 - RNA, 19 nt, Artificial Sequence
  Chemically synthesized
uccaccucgauaucugcca

SEQ ID NO: 82220 - RNA, 19 nt, Artificial Sequence
  Chemically synthesized
uuuuuucuucccacgucua

SEQ ID NO: 82221 - RNA, 19 nt, Artificial Sequence
  Chemically synthesized
uccuauuuacuuagcccag

SEQ ID NO: 82222 - RNA, 19 nt, Artificial Sequence
  Chemically synthesized
ugucgauggaaaaacacau

SEQ ID NO: 82223 - RNA, 19 nt, Artificial Sequence
  Chemically synthesized
ccuugugugcucaucauuc

SEQ ID NO: 82224 - RNA, 19 nt, Artificial Sequence
  Chemically synthesized
ugcagcugacagauaauag

SEQ ID NO: 82225 - RNA, 19 nt, Artificial Sequence
  Chemically synthesized
uucuuugaggaugacagua

SEQ ID NO: 82226 - RNA, 19 nt, Artificial Sequence
  Chemically synthesized
ugugaauuagagccagaug

SEQ ID NO: 82227 - RNA, 19 nt, Artificial Sequence
  Chemically synthesized
uuacuuagcccagcuccau

SEQ ID NO: 82228 - RNA, 19 nt, Artificial Sequence
  Chemically synthesized
uaacucugccacagcugca

SEQ ID NO: 82229 - RNA, 19 nt, Artificial Sequence
  Chemically synthesized
auugccucaggcgugaaac

SEQ ID NO: 82230 - RNA, 19 nt, Artificial Sequence
  Chemically synthesized
augaaaaaggccaguaauc

SEQ ID NO: 82231 - RNA, 19 nt, Artificial Sequence
  Chemically synthesized
aagguaacuaacaugaaac

SEQ ID NO: 82232 - RNA, 19 nt, Artificial Sequence
  Chemically synthesized
uguuagagcagugucaaaa

SEQ ID NO: 82233 - RNA, 19 nt, Artificial Sequence
  Chemically synthesized
aguaccuugcagcugacag

SEQ ID NO: 82234 - RNA, 19 nt, Artificial Sequence
  Chemically synthesized
auucccaaccaggaugaug

SEQ ID NO: 82235 - RNA, 19 nt, Artificial Sequence
  Chemically synthesized
uuucuuugaggaugacagu

SEQ ID NO: 82236 - RNA, 19 nt, Artificial Sequence
  Chemically synthesized
augaauuuuccaucugacu

SEQ ID NO: 82237 - RNA, 19 nt, Artificial Sequence
  Chemically synthesized
acaggcuccaucaccaaca

SEQ ID NO: 82238 - RNA, 19 nt, Artificial Sequence
  Chemically synthesized
ugaaaaaggccaguaauca

SEQ ID NO: 82239 - RNA, 19 nt, Artificial Sequence
  Chemically synthesized
uuugaggaugacaguauua

SEQ ID NO: 82240 - RNA, 19 nt, Artificial Sequence
  Chemically synthesized
cucgauaucugccacauag

SEQ ID NO: 82241 - RNA, 19 nt, Artificial Sequence
  Chemically synthesized
uccugcuucaucuuggcua

SEQ ID NO: 82242 - RNA, 19 nt, Artificial Sequence
  Chemically synthesized
ucuaccugcuuuccaucca

SEQ ID NO: 82243 - RNA, 19 nt, Artificial Sequence
  Chemically synthesized
acagugaggagaaaagagc

SEQ ID NO: 82244 - RNA, 19 nt, Artificial Sequence
  Chemically synthesized
uaacuaacaugaaaccaca

SEQ ID NO: 82245 - RNA, 19 nt, Artificial Sequence
  Chemically synthesized
uuuccacaggcuccaucac

SEQ ID NO: 82246 - RNA, 19 nt, Artificial Sequence
  Chemically synthesized
aaaaccucucucacuccau

SEQ ID NO: 82247 - RNA, 19 nt, Artificial Sequence
  Chemically synthesized
cucuaccugcuuuccaucc

SEQ ID NO: 82248 - RNA, 19 nt, Artificial Sequence
  Chemically synthesized
aaugaauuuuccaucugac

SEQ ID NO: 82249 - RNA, 19 nt, Artificial Sequence
  Chemically synthesized
ucaaaauuaaccgcauaag

SEQ ID NO: 82250 - RNA, 19 nt, Artificial Sequence
  Chemically synthesized
ucauaaucuuccugcccag

SEQ ID NO: 82251 - RNA, 19 nt, Artificial Sequence
  Chemically synthesized
ugacuucugauuuguaauc

SEQ ID NO: 82252 - RNA, 19 nt, Artificial Sequence
  Chemically synthesized
ucaucauuccgaagauccu

SEQ ID NO: 82253 - RNA, 19 nt, Artificial Sequence
  Chemically synthesized
uugcagcugacagauaaua

SEQ ID NO: 82254 - RNA, 19 nt, Artificial Sequence
  Chemically synthesized
cuuauucccaaccaggaug

SEQ ID NO: 82255 - RNA, 19 nt, Artificial Sequence
  Chemically synthesized
uucuucccacgucuagcuu

SEQ ID NO: 82256 - RNA, 19 nt, Artificial Sequence
  Chemically synthesized
uccauccaccucgauaucu

SEQ ID NO: 82257 - RNA, 19 nt, Artificial Sequence
  Chemically synthesized
ugggcuuuucugguugagc

SEQ ID NO: 82258 - RNA, 19 nt, Artificial Sequence
  Chemically synthesized
uuuucugguugagcccauu

SEQ ID NO: 82259 - RNA, 19 nt, Artificial Sequence
  Chemically synthesized
auaguucucaaacacugug

SEQ ID NO: 82260 - RNA, 19 nt, Artificial Sequence
  Chemically synthesized
agaacuguaacucugccac

SEQ ID NO: 82261 - RNA, 19 nt, Artificial Sequence
  Chemically synthesized
uuccauccaccucgauauc

SEQ ID NO: 82262 - RNA, 19 nt, Artificial Sequence
  Chemically synthesized
gcgaucauaaucuuccugc

SEQ ID NO: 82263 - RNA, 19 nt, Artificial Sequence
  Chemically synthesized
acucuaccugcuuuccauc

SEQ ID NO: 82264 - RNA, 19 nt, Artificial Sequence
  Chemically synthesized
uugcagagcagcucucgua

SEQ ID NO: 82265 - RNA, 19 nt, Artificial Sequence
  Chemically synthesized
acacaucaguauaacaucg

SEQ ID NO: 82266 - RNA, 19 nt, Artificial Sequence
  Chemically synthesized
accugcuuuccauccaccu

SEQ ID NO: 82267 - RNA, 19 nt, Artificial Sequence
  Chemically synthesized
ugacucaccagaguaccuu

SEQ ID NO: 82268 - RNA, 19 nt, Artificial Sequence
  Chemically synthesized
ucccacaaagccaacucua

SEQ ID NO: 82269 - RNA, 19 nt, Artificial Sequence
  Chemically synthesized
aaccacagaacuguaacuc

SEQ ID NO: 82270 - RNA, 19 nt, Artificial Sequence
  Chemically synthesized
ucaggcaacgaauccgagu

SEQ ID NO: 82271 - RNA, 19 nt, Artificial Sequence
  Chemically synthesized
ucgauaucugccacauagu

SEQ ID NO: 82272 - RNA, 19 nt, Artificial Sequence
  Chemically synthesized
ucaccagaguaccuugcag

SEQ ID NO: 82273 - RNA, 19 nt, Artificial Sequence
  Chemically synthesized
ccacaaagccaacucuacc

SEQ ID NO: 82274 - RNA, 19 nt, Artificial Sequence
  Chemically synthesized
ucuucagguuucaccggcu

SEQ ID NO: 82275 - RNA, 19 nt, Artificial Sequence
  Chemically synthesized
cuuuccauccaccucgaua

SEQ ID NO: 82276 - RNA, 19 nt, Artificial Sequence
  Chemically synthesized
ugagacagguuaugccauc

SEQ ID NO: 82277 - RNA, 19 nt, Artificial Sequence
  Chemically synthesized
ucagaaaaagugacaaaac

SEQ ID NO: 82278 - RNA, 19 nt, Artificial Sequence
  Chemically synthesized
ugcagcaagguuucacaag

SEQ ID NO: 82279 - RNA, 19 nt, Artificial Sequence
  Chemically synthesized
uaucugccacauaguucuc

SEQ ID NO: 82280 - RNA, 19 nt, Artificial Sequence
  Chemically synthesized
aucaguauaacaucgguau

SEQ ID NO: 82281 - RNA, 19 nt, Artificial Sequence
  Chemically synthesized
ugccaucuuccaaaguguc

SEQ ID NO: 82282 - RNA, 19 nt, Artificial Sequence
  Chemically synthesized
accucucucacuccaucuu

SEQ ID NO: 82283 - RNA, 19 nt, Artificial Sequence
  Chemically synthesized
ucaguauaacaucgguauc

SEQ ID NO: 82284 - RNA, 19 nt, Artificial Sequence
  Chemically synthesized
aagcaugucuuuccacagg

SEQ ID NO: 82285 - RNA, 19 nt, Artificial Sequence
  Chemically synthesized
auuagcgccugguguguca

SEQ ID NO: 82286 - RNA, 19 nt, Artificial Sequence
  Chemically synthesized
ugaauuagcgccuggugug

SEQ ID NO: 82287 - RNA, 19 nt, Artificial Sequence
  Chemically synthesized
ucgguaucuggguaggaga

SEQ ID NO: 82288 - RNA, 19 nt, Artificial Sequence
  Chemically synthesized
uuaugccaucuuccaaagu

SEQ ID NO: 82289 - RNA, 19 nt, Artificial Sequence
  Chemically synthesized
guaacuaacaugaaaccac

SEQ ID NO: 82290 - RNA, 19 nt, Artificial Sequence
  Chemically synthesized
agcacugugaauuagagcc

SEQ ID NO: 82291 - RNA, 19 nt, Artificial Sequence
  Chemically synthesized
uccaucuuuggucuuugcu

SEQ ID NO: 82292 - RNA, 19 nt, Artificial Sequence
  Chemically synthesized
aaaaaggccaguaaucaua

SEQ ID NO: 82293 - RNA, 19 nt, Artificial Sequence
  Chemically synthesized
auggaaaaacacaucagua

SEQ ID NO: 82294 - RNA, 19 nt, Artificial Sequence
  Chemically synthesized
auaacaucgguaucugggu

SEQ ID NO: 82295 - RNA, 19 nt, Artificial Sequence
  Chemically synthesized
ugucuuuccacaggcucca

SEQ ID NO: 82296 - RNA, 19 nt, Artificial Sequence
  Chemically synthesized
uacaccucugggaacuggu

SEQ ID NO: 82297 - RNA, 19 nt, Artificial Sequence
  Chemically synthesized
ucauaguuggcuucuaaau

SEQ ID NO: 82298 - RNA, 19 nt, Artificial Sequence
  Chemically synthesized
agacaaggcacccagauuu

SEQ ID NO: 82299 - RNA, 19 nt, Artificial Sequence
  Chemically synthesized
cuugaauuagcgccuggug

SEQ ID NO: 82300 - RNA, 19 nt, Artificial Sequence
  Chemically synthesized
ugccacagcugcaugaacu

SEQ ID NO: 82301 - RNA, 19 nt, Artificial Sequence
  Chemically synthesized
aucauaguuggcuucuaaa

SEQ ID NO: 82302 - RNA, 19 nt, Artificial Sequence
  Chemically synthesized
ucagcuggagagaagagag

SEQ ID NO: 82303 - RNA, 19 nt, Artificial Sequence
  Chemically synthesized
uuagucagcuggagagaag

SEQ ID NO: 82304 - RNA, 19 nt, Artificial Sequence
  Chemically synthesized
ucuuccaaagugucuaauu

SEQ ID NO: 82305 - RNA, 19 nt, Artificial Sequence
  Chemically synthesized
aguuucuuccggauggcag

SEQ ID NO: 82306 - RNA, 19 nt, Artificial Sequence
  Chemically synthesized
agauuuuuucuucccacgu

SEQ ID NO: 82307 - RNA, 19 nt, Artificial Sequence
  Chemically synthesized
aaucaccaguuucuuccgg

SEQ ID NO: 82308 - RNA, 19 nt, Artificial Sequence
  Chemically synthesized
uugcagcaagguuucacaa

SEQ ID NO: 82309 - RNA, 19 nt, Artificial Sequence
  Chemically synthesized
acagauaauaggcaggaca

SEQ ID NO: 82310 - RNA, 19 nt, Artificial Sequence
  Chemically synthesized
acaaagccaacucuaccug

SEQ ID NO: 82311 - RNA, 19 nt, Artificial Sequence
  Chemically synthesized
uagucagcuggagagaaga

SEQ ID NO: 82312 - RNA, 19 nt, Artificial Sequence
  Chemically synthesized
auuagagccagaugcuuaa

SEQ ID NO: 82313 - RNA, 19 nt, Artificial Sequence
  Chemically synthesized
ccuucuucagguuucaccg

SEQ ID NO: 82314 - RNA, 19 nt, Artificial Sequence
  Chemically synthesized
aguuggcuucuaaauacug

SEQ ID NO: 82315 - RNA, 19 nt, Artificial Sequence
  Chemically synthesized
ccgaagauccuucuuauuc

SEQ ID NO: 82316 - RNA, 19 nt, Artificial Sequence
  Chemically synthesized
cugauuuguaaucuuaggu

SEQ ID NO: 82317 - RNA, 19 nt, Artificial Sequence
  Chemically synthesized
ucugccacauaguucucaa

SEQ ID NO: 82318 - RNA, 19 nt, Artificial Sequence
  Chemically synthesized
acaugaaaccacagaacug

SEQ ID NO: 82319 - RNA, 19 nt, Artificial Sequence
  Chemically synthesized
ucgauggaaaaacacauca

SEQ ID NO: 82320 - RNA, 19 nt, Artificial Sequence
  Chemically synthesized
uaccuugcagcugacagau

SEQ ID NO: 82321 - RNA, 19 nt, Artificial Sequence
  Chemically synthesized
cuagaaagaagcaagaagu

SEQ ID NO: 82322 - RNA, 19 nt, Artificial Sequence
  Chemically synthesized
aaucuuccugcccagcugu

SEQ ID NO: 82323 - RNA, 19 nt, Artificial Sequence
  Chemically synthesized
ugugcucaucauuccgaag

SEQ ID NO: 82324 - RNA, 19 nt, Artificial Sequence
  Chemically synthesized
auaggcaggacauguuagu

SEQ ID NO: 82325 - RNA, 19 nt, Artificial Sequence
  Chemically synthesized
ccucaggcgaucauaaucu

SEQ ID NO: 82326 - RNA, 19 nt, Artificial Sequence
  Chemically synthesized
acacugugggcacauacac

SEQ ID NO: 82327 - RNA, 19 nt, Artificial Sequence
  Chemically synthesized
ugucaaaaggacccuggug

SEQ ID NO: 82328 - RNA, 19 nt, Artificial Sequence
  Chemically synthesized
aaaaaccucucucacucca

SEQ ID NO: 82329 - RNA, 19 nt, Artificial Sequence
  Chemically synthesized
uuagagccagaugcuuaag

SEQ ID NO: 82330 - RNA, 19 nt, Artificial Sequence
  Chemically synthesized
caugucuuuccacaggcuc

SEQ ID NO: 82331 - RNA, 19 nt, Artificial Sequence
  Chemically synthesized
aggagaaaagagcacugug

SEQ ID NO: 82332 - RNA, 19 nt, Artificial Sequence
  Chemically synthesized
aguauaacaucgguaucug

SEQ ID NO: 82333 - RNA, 19 nt, Artificial Sequence
  Chemically synthesized
aauaggcaggacauguuag

SEQ ID NO: 82334 - RNA, 19 nt, Artificial Sequence
  Chemically synthesized
ugacaaaacgggaauuuaa

SEQ ID NO: 82335 - RNA, 19 nt, Artificial Sequence
  Chemically synthesized
acuaacaugaaaccacaga

SEQ ID NO: 82336 - RNA, 19 nt, Artificial Sequence
  Chemically synthesized
gaucauaaucuuccugccc

SEQ ID NO: 82337 - RNA, 19 nt, Artificial Sequence
  Chemically synthesized
ucacuccaucuuuggucuu

SEQ ID NO: 82338 - RNA, 19 nt, Artificial Sequence
  Chemically synthesized
aacaugaaaccacagaacu

SEQ ID NO: 82339 - RNA, 19 nt, Artificial Sequence
  Chemically synthesized
uaaagcccugaagugguga

SEQ ID NO: 82340 - RNA, 19 nt, Artificial Sequence
  Chemically synthesized
uggaaaaacacaucaguau

SEQ ID NO: 82341 - RNA, 19 nt, Artificial Sequence
  Chemically synthesized
aguuuagucagcuggagag

SEQ ID NO: 82342 - RNA, 19 nt, Artificial Sequence
  Chemically synthesized
auugcucaggcaacgaauc

SEQ ID NO: 82343 - RNA, 19 nt, Artificial Sequence
  Chemically synthesized
ucucaaacacugugggcac

SEQ ID NO: 82344 - RNA, 19 nt, Artificial Sequence
  Chemically synthesized
ugaaguggugacucaccag

SEQ ID NO: 82345 - RNA, 19 nt, Artificial Sequence
  Chemically synthesized
aauuagagccagaugcuua

SEQ ID NO: 82346 - RNA, 19 nt, Artificial Sequence
  Chemically synthesized
cacaaagccaacucuaccu

SEQ ID NO: 82347 - RNA, 19 nt, Artificial Sequence
  Chemically synthesized
ccagauuuuuucuucccac

SEQ ID NO: 82348 - RNA, 19 nt, Artificial Sequence
  Chemically synthesized
uucccacgucuagcuugca

SEQ ID NO: 82349 - RNA, 19 nt, Artificial Sequence
  Chemically synthesized
aucgguaucuggguaggag

SEQ ID NO: 82350 - RNA, 19 nt, Artificial Sequence
  Chemically synthesized
gccuucuucagguuucacc

SEQ ID NO: 82351 - RNA, 19 nt, Artificial Sequence
  Chemically synthesized
cacaucaguauaacaucgg

SEQ ID NO: 82352 - RNA, 19 nt, Artificial Sequence
  Chemically synthesized
guugggacagaaaugcuug

SEQ ID NO: 82353 - RNA, 19 nt, Artificial Sequence
  Chemically synthesized
gugcucaucauuccgaaga

SEQ ID NO: 82354 - RNA, 19 nt, Artificial Sequence
  Chemically synthesized
augagaacugguggcuccu

SEQ ID NO: 82355 - RNA, 19 nt, Artificial Sequence
  Chemically synthesized
agaccguggacuaacgaga

SEQ ID NO: 82356 - RNA, 19 nt, Artificial Sequence
  Chemically synthesized
cuauuuacuuagcccagcu

SEQ ID NO: 82357 - RNA, 19 nt, Artificial Sequence
  Chemically synthesized
acucaccagaguaccuugc

SEQ ID NO: 82358 - RNA, 19 nt, Artificial Sequence
  Chemically synthesized
aacucuaccugcuuuccau

SEQ ID NO: 82359 - RNA, 19 nt, Artificial Sequence
  Chemically synthesized
gauaauaggcaggacaugu

SEQ ID NO: 82360 - RNA, 19 nt, Artificial Sequence
  Chemically synthesized
agugccacccaugagaacu

SEQ ID NO: 82361 - RNA, 19 nt, Artificial Sequence
  Chemically synthesized
acuguaacucugccacagc

SEQ ID NO: 82362 - RNA, 19 nt, Artificial Sequence
  Chemically synthesized
auacagugaggagaaaaga

SEQ ID NO: 82363 - RNA, 19 nt, Artificial Sequence
  Chemically synthesized
aaguuuagucagcuggaga

SEQ ID NO: 82364 - RNA, 19 nt, Artificial Sequence
  Chemically synthesized
aaucuguuacggaguaaag

SEQ ID NO: 82365 - RNA, 19 nt, Artificial Sequence
  Chemically synthesized
uacggaguaaagcccugaa

SEQ ID NO: 82366 - RNA, 19 nt, Artificial Sequence
  Chemically synthesized
uccaggugagacagguuau

SEQ ID NO: 82367 - RNA, 19 nt, Artificial Sequence
  Chemically synthesized
cuaccugcuuuccauccac

SEQ ID NO: 82368 - RNA, 19 nt, Artificial Sequence
  Chemically synthesized
uggccaucuuuuaucagaa

SEQ ID NO: 82369 - RNA, 19 nt, Artificial Sequence
  Chemically synthesized
uagcaagaugacuucugau

SEQ ID NO: 82370 - RNA, 19 nt, Artificial Sequence
  Chemically synthesized
ugguagcaagaugacuucu

SEQ ID NO: 82371 - RNA, 19 nt, Artificial Sequence
  Chemically synthesized
cuuucuagaaagaagcaag

SEQ ID NO: 82372 - RNA, 19 nt, Artificial Sequence
  Chemically synthesized
guggacuaacgagagaacc

SEQ ID NO: 82373 - RNA, 19 nt, Artificial Sequence
  Chemically synthesized
cauaaucuuccugcccagc

SEQ ID NO: 82374 - RNA, 19 nt, Artificial Sequence
  Chemically synthesized
gccauuucaaaaaccucuc

SEQ ID NO: 82375 - RNA, 19 nt, Artificial Sequence
  Chemically synthesized
ccuauuuacuuagcccagc

SEQ ID NO: 82376 - RNA, 19 nt, Artificial Sequence
  Chemically synthesized
agcaugucuuuccacaggc

SEQ ID NO: 82377 - RNA, 19 nt, Artificial Sequence
  Chemically synthesized
accagaguaccuugcagcu

SEQ ID NO: 82378 - RNA, 19 nt, Artificial Sequence
  Chemically synthesized
aacacugugggcacauaca

SEQ ID NO: 82379 - RNA, 19 nt, Artificial Sequence
  Chemically synthesized
ugcaugaacuugggcuuuu

SEQ ID NO: 82380 - RNA, 19 nt, Artificial Sequence
  Chemically synthesized
caugaaaccacagaacugu

SEQ ID NO: 82381 - RNA, 19 nt, Artificial Sequence
  Chemically synthesized
gccaacucuaccugcuuuc

SEQ ID NO: 82382 - RNA, 19 nt, Artificial Sequence
  Chemically synthesized
caaggcacccagauuuuuu

SEQ ID NO: 82383 - RNA, 19 nt, Artificial Sequence
  Chemically synthesized
ucguagccauuucaaaaac

SEQ ID NO: 82384 - RNA, 19 nt, Artificial Sequence
  Chemically synthesized
ccauccaccucgauaucug

SEQ ID NO: 82385 - RNA, 19 nt, Artificial Sequence
  Chemically synthesized
caagcaugucuuuccacag

SEQ ID NO: 82386 - RNA, 19 nt, Artificial Sequence
  Chemically synthesized
cugguagcaagaugacuuc

SEQ ID NO: 82387 - RNA, 19 nt, Artificial Sequence
  Chemically synthesized
acaaaaucuguuacggagu

SEQ ID NO: 82388 - RNA, 19 nt, Artificial Sequence
  Chemically synthesized
cuuuucugggauguuuucu

SEQ ID NO: 82389 - RNA, 19 nt, Artificial Sequence
  Chemically synthesized
cauaguuggcuucuaaaua

SEQ ID NO: 82390 - RNA, 19 nt, Artificial Sequence
  Chemically synthesized
uuuagucagcuggagagaa

SEQ ID NO: 82391 - RNA, 19 nt, Artificial Sequence
  Chemically synthesized
cugucgauggaaaaacaca

SEQ ID NO: 82392 - RNA, 19 nt, Artificial Sequence
  Chemically synthesized
gucuaauugccucaggcgu

SEQ ID NO: 82393 - RNA, 19 nt, Artificial Sequence
  Chemically synthesized
cuucuucagguuucaccgg

SEQ ID NO: 82394 - RNA, 19 nt, Artificial Sequence
  Chemically synthesized
guuagagcagugucaaaag

SEQ ID NO: 82395 - RNA, 19 nt, Artificial Sequence
  Chemically synthesized
caacucuaccugcuuucca

SEQ ID NO: 82396 - RNA, 19 nt, Artificial Sequence
  Chemically synthesized
ugcuuuccauccaccucga

SEQ ID NO: 82397 - RNA, 19 nt, Artificial Sequence
  Chemically synthesized
guauaacaucgguaucugg

SEQ ID NO: 82398 - RNA, 19 nt, Artificial Sequence
  Chemically synthesized
acagcugcaugaacuuggg

SEQ ID NO: 82399 - RNA, 19 nt, Artificial Sequence
  Chemically synthesized
aauuagcgccugguguguc

SEQ ID NO: 82400 - RNA, 19 nt, Artificial Sequence
  Chemically synthesized
ccaaagugucuaauugccu

SEQ ID NO: 82401 - RNA, 19 nt, Artificial Sequence
  Chemically synthesized
ccaucuuuggucuuugcug

SEQ ID NO: 82402 - RNA, 19 nt, Artificial Sequence
  Chemically synthesized
cuaaacuaucagggcuguc

SEQ ID NO: 82403 - RNA, 19 nt, Artificial Sequence
  Chemically synthesized
cacuuuucugggauguuuu

SEQ ID NO: 82404 - RNA, 19 nt, Artificial Sequence
  Chemically synthesized
agggaaccuggauacagug

SEQ ID NO: 82405 - RNA, 19 nt, Artificial Sequence
  Chemically synthesized
aagacaaggcacccagauu

SEQ ID NO: 82406 - RNA, 19 nt, Artificial Sequence
  Chemically synthesized
ggcuccaucaccaacaauc

SEQ ID NO: 82407 - RNA, 19 nt, Artificial Sequence
  Chemically synthesized
agauccuucuuauucccaa

SEQ ID NO: 82408 - RNA, 19 nt, Artificial Sequence
  Chemically synthesized
uccgaagauccuucuuauu

SEQ ID NO: 82409 - RNA, 19 nt, Artificial Sequence
  Chemically synthesized
aacuaacaugaaaccacag

SEQ ID NO: 82410 - RNA, 19 nt, Artificial Sequence
  Chemically synthesized
gaaaagagcacugugaauu

SEQ ID NO: 82411 - RNA, 19 nt, Artificial Sequence
  Chemically synthesized
cugaaguggugacucacca

SEQ ID NO: 82412 - RNA, 19 nt, Artificial Sequence
  Chemically synthesized
cuaacaugaaaccacagaa

SEQ ID NO: 82413 - RNA, 19 nt, Artificial Sequence
  Chemically synthesized
aacuguaacucugccacag

SEQ ID NO: 82414 - RNA, 19 nt, Artificial Sequence
  Chemically synthesized
caucauuccgaagauccuu

SEQ ID NO: 82415 - RNA, 19 nt, Artificial Sequence
  Chemically synthesized
gagcuaugccaacaaaauc

SEQ ID NO: 82416 - RNA, 19 nt, Artificial Sequence
  Chemically synthesized
aaugaaaaaggccaguaau

SEQ ID NO: 82417 - RNA, 19 nt, Artificial Sequence
  Chemically synthesized
cauccaccucgauaucugc

SEQ ID NO: 82418 - RNA, 19 nt, Artificial Sequence
  Chemically synthesized
acagaacuguaacucugcc

SEQ ID NO: 82419 - RNA, 19 nt, Artificial Sequence
  Chemically synthesized
uagaaagaagcaagaaguu

SEQ ID NO: 82420 - RNA, 19 nt, Artificial Sequence
  Chemically synthesized
cuugcagcaagguuucaca

SEQ ID NO: 82421 - RNA, 19 nt, Artificial Sequence
  Chemically synthesized
gcccauuuucaaaaaacug

SEQ ID NO: 82422 - RNA, 19 nt, Artificial Sequence
  Chemically synthesized
ucaaacacugugggcacau

SEQ ID NO: 82423 - RNA, 19 nt, Artificial Sequence
  Chemically synthesized
gaaaugcuugacuucuggg

SEQ ID NO: 82424 - RNA, 19 nt, Artificial Sequence
  Chemically synthesized
agugaggagaaaagagcac

SEQ ID NO: 82425 - RNA, 19 nt, Artificial Sequence
  Chemically synthesized
gcaagcaugucuuuccaca

SEQ ID NO: 82426 - RNA, 19 nt, Artificial Sequence
  Chemically synthesized
caugaacuugggcuuuucu

SEQ ID NO: 82427 - RNA, 19 nt, Artificial Sequence
  Chemically synthesized
agcaagcaugucuuuccac

SEQ ID NO: 82428 - RNA, 19 nt, Artificial Sequence
  Chemically synthesized
ucuuauucccaaccaggau

SEQ ID NO: 82429 - RNA, 19 nt, Artificial Sequence
  Chemically synthesized
caucaguauaacaucggua

SEQ ID NO: 82430 - RNA, 19 nt, Artificial Sequence
  Chemically synthesized
cacauaguucucaaacacu

SEQ ID NO: 82431 - RNA, 19 nt, Artificial Sequence
  Chemically synthesized
cgugaaaccaauuccuauu

SEQ ID NO: 82432 - RNA, 19 nt, Artificial Sequence
  Chemically synthesized
ugaauuagagccagaugcu

SEQ ID NO: 82433 - RNA, 19 nt, Artificial Sequence
  Chemically synthesized
aucuuccaaagugucuaau

SEQ ID NO: 82434 - RNA, 19 nt, Artificial Sequence
  Chemically synthesized
ucuaaacuaucagggcugu

SEQ ID NO: 82435 - RNA, 19 nt, Artificial Sequence
  Chemically synthesized
ugagugccacccaugagaa

SEQ ID NO: 82436 - RNA, 19 nt, Artificial Sequence
  Chemically synthesized
ugggacagaaaugcuugac

SEQ ID NO: 82437 - RNA, 19 nt, Artificial Sequence
  Chemically synthesized
gcagcugacagauaauagg

SEQ ID NO: 82438 - RNA, 19 nt, Artificial Sequence
  Chemically synthesized
aguaaagcccugaaguggu

SEQ ID NO: 82439 - RNA, 19 nt, Artificial Sequence
  Chemically synthesized
caagguuucacaagacaag

SEQ ID NO: 82440 - RNA, 19 nt, Artificial Sequence
  Chemically synthesized
ugccuucuucagguuucac

SEQ ID NO: 82441 - RNA, 19 nt, Artificial Sequence
  Chemically synthesized
agacagguuaugccaucuu

SEQ ID NO: 82442 - RNA, 19 nt, Artificial Sequence
  Chemically synthesized
agcccauuuucaaaaaacu

SEQ ID NO: 82443 - RNA, 19 nt, Artificial Sequence
  Chemically synthesized
agcuggagagaagagagac

SEQ ID NO: 82444 - RNA, 19 nt, Artificial Sequence
  Chemically synthesized
ugguugagcccauuuucaa

SEQ ID NO: 82445 - RNA, 19 nt, Artificial Sequence
  Chemically synthesized
acuuucuuugaggaugaca

SEQ ID NO: 82446 - RNA, 19 nt, Artificial Sequence
  Chemically synthesized
caccaguuucuuccggaug

SEQ ID NO: 82447 - RNA, 19 nt, Artificial Sequence
  Chemically synthesized
acauacaccucugggaacu

SEQ ID NO: 82448 - RNA, 19 nt, Artificial Sequence
  Chemically synthesized
cugguugagcccauuuuca

SEQ ID NO: 82449 - RNA, 19 nt, Artificial Sequence
  Chemically synthesized
ccuugaauuagcgccuggu

SEQ ID NO: 82450 - RNA, 19 nt, Artificial Sequence
  Chemically synthesized
agccagaugcuuaagucca

SEQ ID NO: 82451 - RNA, 19 nt, Artificial Sequence
  Chemically synthesized
aagagcacugugaauuaga

SEQ ID NO: 82452 - RNA, 19 nt, Artificial Sequence
  Chemically synthesized
cugccuuuauucuauuagu

SEQ ID NO: 82453 - RNA, 19 nt, Artificial Sequence
  Chemically synthesized
cccagauuuuuucuuccca

SEQ ID NO: 82454 - RNA, 19 nt, Artificial Sequence
  Chemically synthesized
gacagguuaugccaucuuc

SEQ ID NO: 82455 - RNA, 19 nt, Artificial Sequence
  Chemically synthesized
guaccuugcagcugacaga

SEQ ID NO: 82456 - RNA, 19 nt, Artificial Sequence
  Chemically synthesized
ucaccaguuucuuccggau

SEQ ID NO: 82457 - RNA, 19 nt, Artificial Sequence
  Chemically synthesized
ucuuucuagaaagaagcaa

SEQ ID NO: 82458 - RNA, 19 nt, Artificial Sequence
  Chemically synthesized
aggcacccagauuuuuucu

SEQ ID NO: 82459 - RNA, 19 nt, Artificial Sequence
  Chemically synthesized
acgucuagcuugcagagca

SEQ ID NO: 82460 - RNA, 19 nt, Artificial Sequence
  Chemically synthesized
ugaaaccacagaacuguaa

SEQ ID NO: 82461 - RNA, 19 nt, Artificial Sequence
  Chemically synthesized
acagcacuucaaaauuaac

SEQ ID NO: 82462 - RNA, 19 nt, Artificial Sequence
  Chemically synthesized
acugguacagaaaaaaagu

SEQ ID NO: 82463 - RNA, 19 nt, Artificial Sequence
  Chemically synthesized
agauaauaggcaggacaug

SEQ ID NO: 82464 - RNA, 19 nt, Artificial Sequence
  Chemically synthesized
aaaagagcacugugaauua

SEQ ID NO: 82465 - RNA, 19 nt, Artificial Sequence
  Chemically synthesized
aagcccugaaguggugacu

SEQ ID NO: 82466 - RNA, 19 nt, Artificial Sequence
  Chemically synthesized
caaaauuaaccgcauaagg

SEQ ID NO: 82467 - RNA, 19 nt, Artificial Sequence
  Chemically synthesized
gauacagugaggagaaaag

SEQ ID NO: 82468 - RNA, 19 nt, Artificial Sequence
  Chemically synthesized
ccaucuuccaaagugucua

SEQ ID NO: 82469 - RNA, 19 nt, Artificial Sequence
  Chemically synthesized
guaauauggccaucuuuua

SEQ ID NO: 82470 - RNA, 19 nt, Artificial Sequence
  Chemically synthesized
gaacuugggcuuuucuggu

SEQ ID NO: 82471 - RNA, 19 nt, Artificial Sequence
  Chemically synthesized
agaagcaagaaguuaagaa

SEQ ID NO: 82472 - RNA, 19 nt, Artificial Sequence
  Chemically synthesized
acaucgguaucuggguagg

SEQ ID NO: 82473 - RNA, 19 nt, Artificial Sequence
  Chemically synthesized
gaaguggugacucaccaga

SEQ ID NO: 82474 - RNA, 19 nt, Artificial Sequence
  Chemically synthesized
ugugucccacaaagccaac

SEQ ID NO: 82475 - RNA, 19 nt, Artificial Sequence
  Chemically synthesized
ccaacucuaccugcuuucc

SEQ ID NO: 82476 - RNA, 19 nt, Artificial Sequence
  Chemically synthesized
gccuuuauucuauuaguag

SEQ ID NO: 82477 - RNA, 19 nt, Artificial Sequence
  Chemically synthesized
aaaucuguuacggaguaaa

SEQ ID NO: 82478 - RNA, 19 nt, Artificial Sequence
  Chemically synthesized
agccaacucuaccugcuuu

SEQ ID NO: 82479 - RNA, 19 nt, Artificial Sequence
  Chemically synthesized
gaaagaagcaagaaguuaa

SEQ ID NO: 82480 - RNA, 19 nt, Artificial Sequence
  Chemically synthesized
gauccuucuuauucccaac

SEQ ID NO: 82481 - RNA, 19 nt, Artificial Sequence
  Chemically synthesized
guuaugccaucuuccaaag

SEQ ID NO: 82482 - RNA, 19 nt, Artificial Sequence
  Chemically synthesized
aaagcccugaaguggugac

SEQ ID NO: 82483 - RNA, 19 nt, Artificial Sequence
  Chemically synthesized
cucguagccauuucaaaaa

SEQ ID NO: 82484 - RNA, 19 nt, Artificial Sequence
  Chemically synthesized
aguucucaaacacuguggg

SEQ ID NO: 82485 - RNA, 19 nt, Artificial Sequence
  Chemically synthesized
cguagccauuucaaaaacc

SEQ ID NO: 82486 - RNA, 19 nt, Artificial Sequence
  Chemically synthesized
cagguuaugccaucuucca

SEQ ID NO: 82487 - RNA, 19 nt, Artificial Sequence
  Chemically synthesized
agagcuaugccaacaaaau

SEQ ID NO: 82488 - RNA, 19 nt, Artificial Sequence
  Chemically synthesized
gguaauauggccaucuuuu

SEQ ID NO: 82489 - RNA, 19 nt, Artificial Sequence
  Chemically synthesized
cuuugaggaugacaguauu

SEQ ID NO: 82490 - RNA, 19 nt, Artificial Sequence
  Chemically synthesized
cauugcucaggcaacgaau

SEQ ID NO: 82491 - RNA, 19 nt, Artificial Sequence
  Chemically synthesized
ucagggcugucgauggaaa

SEQ ID NO: 82492 - RNA, 19 nt, Artificial Sequence
  Chemically synthesized
ccuucuuauucccaaccag

SEQ ID NO: 82493 - RNA, 19 nt, Artificial Sequence
  Chemically synthesized
auacacuuucuuugaggau

SEQ ID NO: 82494 - RNA, 19 nt, Artificial Sequence
  Chemically synthesized
ccacauaguucucaaacac

SEQ ID NO: 82495 - RNA, 19 nt, Artificial Sequence
  Chemically synthesized
acaguauuaggaaauccaa

SEQ ID NO: 82496 - RNA, 19 nt, Artificial Sequence
  Chemically synthesized
gcuugcagcaagguuucac

SEQ ID NO: 82497 - RNA, 19 nt, Artificial Sequence
  Chemically synthesized
aucagggcugucgauggaa

SEQ ID NO: 82498 - RNA, 19 nt, Artificial Sequence
  Chemically synthesized
acaagacaaggcacccaga

SEQ ID NO: 82499 - RNA, 19 nt, Artificial Sequence
  Chemically synthesized
uaacaucgguaucugggua

SEQ ID NO: 82500 - RNA, 19 nt, Artificial Sequence
  Chemically synthesized
acggaguaaagcccugaag

SEQ ID NO: 82501 - RNA, 19 nt, Artificial Sequence
  Chemically synthesized
acaaggcacccagauuuuu

SEQ ID NO: 82502 - RNA, 19 nt, Artificial Sequence
  Chemically synthesized
gagcagugucaaaaggacc

SEQ ID NO: 82503 - RNA, 19 nt, Artificial Sequence
  Chemically synthesized
cccacaaagccaacucuac

SEQ ID NO: 82504 - RNA, 19 nt, Artificial Sequence
  Chemically synthesized
aauccgaguccagccucuu

SEQ ID NO: 82505 - RNA, 21 nt, Artificial Sequence
  Chemically synthesized
gaccaaagauggagugagaga

SEQ ID NO: 82506 - RNA, 21 nt, Artificial Sequence
  Chemically synthesized
gagugagagagguuuuugaaa

SEQ ID NO: 82507 - RNA, 21 nt, Artificial Sequence
  Chemically synthesized
cauggagcugggcuaaguaaa

SEQ ID NO: 82508 - RNA, 21 nt, Artificial Sequence
  Chemically synthesized
ggaaauaaagucagauggaaa

SEQ ID NO: 82509 - RNA, 21 nt, Artificial Sequence
  Chemically synthesized
caaagauggagugagagaggu

SEQ ID NO: 82510 - RNA, 21 nt, Artificial Sequence
  Chemically synthesized
guacauggaguguucagcaaa

SEQ ID NO: 82511 - RNA, 21 nt, Artificial Sequence
  Chemically synthesized
ccacuuaauguauguuaccaa

SEQ ID NO: 82512 - RNA, 21 nt, Artificial Sequence
  Chemically synthesized
gcuucuuucuagaaagagaaa

SEQ ID NO: 82513 - RNA, 21 nt, Artificial Sequence
  Chemically synthesized
gaaggaucuucggaaugauga

SEQ ID NO: 82514 - RNA, 21 nt, Artificial Sequence
  Chemically synthesized
gguggauggaaagcagguaga

SEQ ID NO: 82515 - RNA, 21 nt, Artificial Sequence
  Chemically synthesized
ccauggagcugggcuaaguaa

SEQ ID NO: 82516 - RNA, 21 nt, Artificial Sequence
  Chemically synthesized
gguacauggaguguucagcaa

SEQ ID NO: 82517 - RNA, 21 nt, Artificial Sequence
  Chemically synthesized
cauccugguugggaauaagaa

SEQ ID NO: 82518 - RNA, 21 nt, Artificial Sequence
  Chemically synthesized
cuaccaguauuuagaagccaa

SEQ ID NO: 82519 - RNA, 21 nt, Artificial Sequence
  Chemically synthesized
cccugauaguuuagaaaacau

SEQ ID NO: 82520 - RNA, 21 nt, Artificial Sequence
  Chemically synthesized
ggagugagagagguuuuugaa

SEQ ID NO: 82521 - RNA, 21 nt, Artificial Sequence
  Chemically synthesized
guuugagaacuauguggcaga

SEQ ID NO: 82522 - RNA, 21 nt, Artificial Sequence
  Chemically synthesized
caugcagcuguggcagaguua

SEQ ID NO: 82523 - RNA, 21 nt, Artificial Sequence
  Chemically synthesized
agaaggcagagauauggcaaa

SEQ ID NO: 82524 - RNA, 21 nt, Artificial Sequence
  Chemically synthesized
cagcccugauaguuuagaaaa

SEQ ID NO: 82525 - RNA, 21 nt, Artificial Sequence
  Chemically synthesized
cagauaucgagguggauggaa

SEQ ID NO: 82526 - RNA, 21 nt, Artificial Sequence
  Chemically synthesized
gcagagauauggcaaacagga

SEQ ID NO: 82527 - RNA, 21 nt, Artificial Sequence
  Chemically synthesized
agauaucgagguggauggaaa

SEQ ID NO: 82528 - RNA, 21 nt, Artificial Sequence
  Chemically synthesized
guuuuugaaauggcuacgaga

SEQ ID NO: 82529 - RNA, 21 nt, Artificial Sequence
  Chemically synthesized
gcugggcuaaguaaauaggaa

SEQ ID NO: 82530 - RNA, 21 nt, Artificial Sequence
  Chemically synthesized
cagagauauggcaaacaggau

SEQ ID NO: 82531 - RNA, 21 nt, Artificial Sequence
  Chemically synthesized
gaacuauguggcagauaucga

SEQ ID NO: 82532 - RNA, 21 nt, Artificial Sequence
  Chemically synthesized
gguagaguuggcuuuguggga

SEQ ID NO: 82533 - RNA, 21 nt, Artificial Sequence
  Chemically synthesized
gaagaaggcagagauauggca

SEQ ID NO: 82534 - RNA, 21 nt, Artificial Sequence
  Chemically synthesized
ggagcugggcuaaguaaauag

SEQ ID NO: 82535 - RNA, 21 nt, Artificial Sequence
  Chemically synthesized
cgauguuauacugauguguuu

SEQ ID NO: 82536 - RNA, 21 nt, Artificial Sequence
  Chemically synthesized
gauggagugagagagguuuuu

SEQ ID NO: 82537 - RNA, 21 nt, Artificial Sequence
  Chemically synthesized
agagcugcucugcaagcuaga

SEQ ID NO: 82538 - RNA, 21 nt, Artificial Sequence
  Chemically synthesized
gagccggugaaaccugaagaa

SEQ ID NO: 82539 - RNA, 21 nt, Artificial Sequence
  Chemically synthesized
ggauggaaagcagguagaguu

SEQ ID NO: 82540 - RNA, 21 nt, Artificial Sequence
  Chemically synthesized
caggauuggcgcuuuugggua

SEQ ID NO: 82541 - RNA, 21 nt, Artificial Sequence
  Chemically synthesized
cggugaaaccugaagaaggca

SEQ ID NO: 82542 - RNA, 21 nt, Artificial Sequence
  Chemically synthesized
cugggcuaaguaaauaggaau

SEQ ID NO: 82543 - RNA, 21 nt, Artificial Sequence
  Chemically synthesized
ccaguauuuagaagccaacua

SEQ ID NO: 82544 - RNA, 21 nt, Artificial Sequence
  Chemically synthesized
gaggcaauuagacacuuugga

SEQ ID NO: 82545 - RNA, 21 nt, Artificial Sequence
  Chemically synthesized
gaguguucagcaaagaccaaa

SEQ ID NO: 82546 - RNA, 21 nt, Artificial Sequence
  Chemically synthesized
uggaaagacaugcuugcucau

SEQ ID NO: 82547 - RNA, 21 nt, Artificial Sequence
  Chemically synthesized
cacagcugggcaggaagauua

SEQ ID NO: 82548 - RNA, 21 nt, Artificial Sequence
  Chemically synthesized
uggagugagagagguuuuuga

SEQ ID NO: 82549 - RNA, 21 nt, Artificial Sequence
  Chemically synthesized
guguaauuagugccacuuaau

SEQ ID NO: 82550 - RNA, 21 nt, Artificial Sequence
  Chemically synthesized
gagaaacaguugguaacuuuu

SEQ ID NO: 82551 - RNA, 21 nt, Artificial Sequence
  Chemically synthesized
guuuagaaaacaucccagaaa

SEQ ID NO: 82552 - RNA, 21 nt, Artificial Sequence
  Chemically synthesized
auacugucauccucaaagaaa

SEQ ID NO: 82553 - RNA, 21 nt, Artificial Sequence
  Chemically synthesized
ggaguguucagcaaagaccaa

SEQ ID NO: 82554 - RNA, 21 nt, Artificial Sequence
  Chemically synthesized
aauacugucauccucaaagaa

SEQ ID NO: 82555 - RNA, 21 nt, Artificial Sequence
  Chemically synthesized
ggcagagauauggcaaacagg

SEQ ID NO: 82556 - RNA, 21 nt, Artificial Sequence
  Chemically synthesized
acagcugggcaggaagauuau

SEQ ID NO: 82557 - RNA, 21 nt, Artificial Sequence
  Chemically synthesized
gaagucaucuugcuaccagua

SEQ ID NO: 82558 - RNA, 21 nt, Artificial Sequence
  Chemically synthesized
gcaagguacucuggugaguca

SEQ ID NO: 82559 - RNA, 21 nt, Artificial Sequence
  Chemically synthesized
cuguguaauuagugccacuua

SEQ ID NO: 82560 - RNA, 21 nt, Artificial Sequence
  Chemically synthesized
agcugggcaggaagauuauga

SEQ ID NO: 82561 - RNA, 21 nt, Artificial Sequence
  Chemically synthesized
gauggagccuguggaaagaca

SEQ ID NO: 82562 - RNA, 21 nt, Artificial Sequence
  Chemically synthesized
ggguacauggaguguucagca

SEQ ID NO: 82563 - RNA, 21 nt, Artificial Sequence
  Chemically synthesized
agcugggcuaaguaaauagga

SEQ ID NO: 82564 - RNA, 21 nt, Artificial Sequence
  Chemically synthesized
agaggagccaccaguucucau

SEQ ID NO: 82565 - RNA, 21 nt, Artificial Sequence
  Chemically synthesized
cccagauaccgauguuauacu

SEQ ID NO: 82566 - RNA, 21 nt, Artificial Sequence
  Chemically synthesized
ggaagaaacuggugauuguug

SEQ ID NO: 82567 - RNA, 21 nt, Artificial Sequence
  Chemically synthesized
auggcugccauccggaagaaa

SEQ ID NO: 82568 - RNA, 21 nt, Artificial Sequence
  Chemically synthesized
agagaaacaguugguaacuuu

SEQ ID NO: 82569 - RNA, 21 nt, Artificial Sequence
  Chemically synthesized
caucgacagcccugauaguuu

SEQ ID NO: 82570 - RNA, 21 nt, Artificial Sequence
  Chemically synthesized
acagcccugauaguuuagaaa

SEQ ID NO: 82571 - RNA, 21 nt, Artificial Sequence
  Chemically synthesized
ccggaagaaacuggugauugu

SEQ ID NO: 82572 - RNA, 21 nt, Artificial Sequence
  Chemically synthesized
uagaguuggcuuugugggaca

SEQ ID NO: 82573 - RNA, 21 nt, Artificial Sequence
  Chemically synthesized
ggauuggcgcuuuuggguaca

SEQ ID NO: 82574 - RNA, 21 nt, Artificial Sequence
  Chemically synthesized
gcugggcaggaagauuaugau

SEQ ID NO: 82575 - RNA, 21 nt, Artificial Sequence
  Chemically synthesized
cuuuugugaauuaggcuguaa

SEQ ID NO: 82576 - RNA, 21 nt, Artificial Sequence
  Chemically synthesized
caugcuugcucauagucuuca

SEQ ID NO: 82577 - RNA, 21 nt, Artificial Sequence
  Chemically synthesized
uggugauggagccuguggaaa

SEQ ID NO: 82578 - RNA, 21 nt, Artificial Sequence
  Chemically synthesized
aaaaugggcucaaccagaaaa

SEQ ID NO: 82579 - RNA, 21 nt, Artificial Sequence
  Chemically synthesized
accugucucaccuggacuuaa

SEQ ID NO: 82580 - RNA, 21 nt, Artificial Sequence
  Chemically synthesized
ggcuguaacuacuuuauaacu

SEQ ID NO: 82581 - RNA, 21 nt, Artificial Sequence
  Chemically synthesized
acaguugguaacuuuugugaa

SEQ ID NO: 82582 - RNA, 21 nt, Artificial Sequence
  Chemically synthesized
guggcagauaucgagguggau

SEQ ID NO: 82583 - RNA, 21 nt, Artificial Sequence
  Chemically synthesized
aagucaucuugcuaccaguau

SEQ ID NO: 82584 - RNA, 21 nt, Artificial Sequence
  Chemically synthesized
aguuuagaaaacaucccagaa

SEQ ID NO: 82585 - RNA, 21 nt, Artificial Sequence
  Chemically synthesized
gcuaaguaaauaggaauuggu

SEQ ID NO: 82586 - RNA, 21 nt, Artificial Sequence
  Chemically synthesized
cacgccugaggcaauuagaca

SEQ ID NO: 82587 - RNA, 21 nt, Artificial Sequence
  Chemically synthesized
agaaagagaaacaguugguaa

SEQ ID NO: 82588 - RNA, 21 nt, Artificial Sequence
  Chemically synthesized
caguugguaacuuuugugaau

SEQ ID NO: 82589 - RNA, 21 nt, Artificial Sequence
  Chemically synthesized
gaauuaggcuguaacuacuuu

SEQ ID NO: 82590 - RNA, 21 nt, Artificial Sequence
  Chemically synthesized
gacagcccugauaguuuagaa

SEQ ID NO: 82591 - RNA, 21 nt, Artificial Sequence
  Chemically synthesized
agaagucaucuugcuaccagu

SEQ ID NO: 82592 - RNA, 21 nt, Artificial Sequence
  Chemically synthesized
caucauccugguugggaauaa

SEQ ID NO: 82593 - RNA, 21 nt, Artificial Sequence
  Chemically synthesized
ugcuucuuucuagaaagagaa

SEQ ID NO: 82594 - RNA, 21 nt, Artificial Sequence
  Chemically synthesized
ucuugugaaaccuugcugcaa

SEQ ID NO: 82595 - RNA, 21 nt, Artificial Sequence
  Chemically synthesized
cagauaccgauguuauacuga

SEQ ID NO: 82596 - RNA, 21 nt, Artificial Sequence
  Chemically synthesized
cggaagaaacuggugauuguu

SEQ ID NO: 82597 - RNA, 21 nt, Artificial Sequence
  Chemically synthesized
ugaauuaggcuguaacuacuu

SEQ ID NO: 82598 - RNA, 21 nt, Artificial Sequence
  Chemically synthesized
acuuaagcaucuggcucuaau

SEQ ID NO: 82599 - RNA, 21 nt, Artificial Sequence
  Chemically synthesized
gaaagagaaacaguugguaac

SEQ ID NO: 82600 - RNA, 21 nt, Artificial Sequence
  Chemically synthesized
gauuggcgcuuuuggguacau

SEQ ID NO: 82601 - RNA, 21 nt, Artificial Sequence
  Chemically synthesized
uugagaacuauguggcagaua

SEQ ID NO: 82602 - RNA, 21 nt, Artificial Sequence
  Chemically synthesized
gguuucauguuaguuaccuua

SEQ ID NO: 82603 - RNA, 21 nt, Artificial Sequence
  Chemically synthesized
aagaccaaagauggagugaga

SEQ ID NO: 82604 - RNA, 21 nt, Artificial Sequence
  Chemically synthesized
ggugaaaccugaagaaggcag

SEQ ID NO: 82605 - RNA, 21 nt, Artificial Sequence
  Chemically synthesized
aagaaggcagagauauggcaa

SEQ ID NO: 82606 - RNA, 21 nt, Artificial Sequence
  Chemically synthesized
gauaaaagauggccauauuac

SEQ ID NO: 82607 - RNA, 21 nt, Artificial Sequence
  Chemically synthesized
uguucagcaaagaccaaagau

SEQ ID NO: 82608 - RNA, 21 nt, Artificial Sequence
  Chemically synthesized
uaugauuacuggccuuuuuca

SEQ ID NO: 82609 - RNA, 21 nt, Artificial Sequence
  Chemically synthesized
agauaccgauguuauacugau

SEQ ID NO: 82610 - RNA, 21 nt, Artificial Sequence
  Chemically synthesized
ggaagauuaugaucgccugag

SEQ ID NO: 82611 - RNA, 21 nt, Artificial Sequence
  Chemically synthesized
uggaaauaaagucagauggaa

SEQ ID NO: 82612 - RNA, 21 nt, Artificial Sequence
  Chemically synthesized
ccagacuagauguaguauuuu

SEQ ID NO: 82613 - RNA, 21 nt, Artificial Sequence
  Chemically synthesized
caguucugugguuucauguua

SEQ ID NO: 82614 - RNA, 21 nt, Artificial Sequence
  Chemically synthesized
gcaggaagauuaugaucgccu

SEQ ID NO: 82615 - RNA, 21 nt, Artificial Sequence
  Chemically synthesized
cuauguggcagauaucgaggu

SEQ ID NO: 82616 - RNA, 21 nt, Artificial Sequence
  Chemically synthesized
ucuugcuaccaguauuuagaa

SEQ ID NO: 82617 - RNA, 21 nt, Artificial Sequence
  Chemically synthesized
gcagauaucgagguggaugga

SEQ ID NO: 82618 - RNA, 21 nt, Artificial Sequence
  Chemically synthesized
guguuugagaacuauguggca

SEQ ID NO: 82619 - RNA, 21 nt, Artificial Sequence
  Chemically synthesized
uggcgcuuuuggguacaugga

SEQ ID NO: 82620 - RNA, 21 nt, Artificial Sequence
  Chemically synthesized
aaggcagagauauggcaaaca

SEQ ID NO: 82621 - RNA, 21 nt, Artificial Sequence
  Chemically synthesized
agagauauggcaaacaggauu

SEQ ID NO: 82622 - RNA, 21 nt, Artificial Sequence
  Chemically synthesized
ucugcaagcuagacgugggaa

SEQ ID NO: 82623 - RNA, 21 nt, Artificial Sequence
  Chemically synthesized
uguguaauuagugccacuuaa

SEQ ID NO: 82624 - RNA, 21 nt, Artificial Sequence
  Chemically synthesized
gacacaccaggcgcuaauuca

SEQ ID NO: 82625 - RNA, 21 nt, Artificial Sequence
  Chemically synthesized
guggaaagacaugcuugcuca

SEQ ID NO: 82626 - RNA, 21 nt, Artificial Sequence
  Chemically synthesized
gugaaaccugaagaaggcaga

SEQ ID NO: 82627 - RNA, 21 nt, Artificial Sequence
  Chemically synthesized
gcccugauaguuuagaaaaca

SEQ ID NO: 82628 - RNA, 21 nt, Artificial Sequence
  Chemically synthesized
agauuuuguuggcauagcucu

SEQ ID NO: 82629 - RNA, 21 nt, Artificial Sequence
  Chemically synthesized
ggaaagacaugcuugcucaua

SEQ ID NO: 82630 - RNA, 21 nt, Artificial Sequence
  Chemically synthesized
ugagaacuauguggcagauau

SEQ ID NO: 82631 - RNA, 21 nt, Artificial Sequence
  Chemically synthesized
gcagguagaguuggcuuugug

SEQ ID NO: 82632 - RNA, 21 nt, Artificial Sequence
  Chemically synthesized
uggagcugggcuaaguaaaua

SEQ ID NO: 82633 - RNA, 21 nt, Artificial Sequence
  Chemically synthesized
ucagcaaagaccaaagaugga

SEQ ID NO: 82634 - RNA, 21 nt, Artificial Sequence
  Chemically synthesized
agugagagagguuuuugaaau

SEQ ID NO: 82635 - RNA, 21 nt, Artificial Sequence
  Chemically synthesized
aguucaugcagcuguggcaga

SEQ ID NO: 82636 - RNA, 21 nt, Artificial Sequence
  Chemically synthesized
gaaacaguugguaacuuuugu

SEQ ID NO: 82637 - RNA, 21 nt, Artificial Sequence
  Chemically synthesized
guuacaguucugugguuucau

SEQ ID NO: 82638 - RNA, 21 nt, Artificial Sequence
  Chemically synthesized
auaacuaacauguccugccua

SEQ ID NO: 82639 - RNA, 21 nt, Artificial Sequence
  Chemically synthesized
gcgcuuuuggguacauggagu

SEQ ID NO: 82640 - RNA, 21 nt, Artificial Sequence
  Chemically synthesized
uugaaaaugggcucaaccaga

SEQ ID NO: 82641 - RNA, 21 nt, Artificial Sequence
  Chemically synthesized
gagguggauggaaagcaggua

SEQ ID NO: 82642 - RNA, 21 nt, Artificial Sequence
  Chemically synthesized
gauaucgagguggauggaaag

SEQ ID NO: 82643 - RNA, 21 nt, Artificial Sequence
  Chemically synthesized
guucugugguuucauguuagu

SEQ ID NO: 82644 - RNA, 21 nt, Artificial Sequence
  Chemically synthesized
uuaucugucagcugcaaggua

SEQ ID NO: 82645 - RNA, 21 nt, Artificial Sequence
  Chemically synthesized
uacccagauaccgauguuaua

SEQ ID NO: 82646 - RNA, 21 nt, Artificial Sequence
  Chemically synthesized
ucugggugccuugucuuguga

SEQ ID NO: 82647 - RNA, 21 nt, Artificial Sequence
  Chemically synthesized
gaguuggcuuugugggacaca

SEQ ID NO: 82648 - RNA, 21 nt, Artificial Sequence
  Chemically synthesized
agugccacuuaauguauguua

SEQ ID NO: 82649 - RNA, 21 nt, Artificial Sequence
  Chemically synthesized
agcugcaagguacucugguga

SEQ ID NO: 82650 - RNA, 21 nt, Artificial Sequence
  Chemically synthesized
cgcuuuuggguacauggagug

SEQ ID NO: 82651 - RNA, 21 nt, Artificial Sequence
  Chemically synthesized
gcaaacaggauuggcgcuuuu

SEQ ID NO: 82652 - RNA, 21 nt, Artificial Sequence
  Chemically synthesized
cucuccuacccagauaccgau

SEQ ID NO: 82653 - RNA, 21 nt, Artificial Sequence
  Chemically synthesized
gaaacuggugauuguugguga

SEQ ID NO: 82654 - RNA, 21 nt, Artificial Sequence
  Chemically synthesized
ccauccggaagaaacugguga

SEQ ID NO: 82655 - RNA, 21 nt, Artificial Sequence
  Chemically synthesized
agguguaugugcccacagugu

SEQ ID NO: 82656 - RNA, 21 nt, Artificial Sequence
  Chemically synthesized
gaaaccugaagaaggcagaga

SEQ ID NO: 82657 - RNA, 21 nt, Artificial Sequence
  Chemically synthesized
gcuugcucauagucuucagca

SEQ ID NO: 82658 - RNA, 21 nt, Artificial Sequence
  Chemically synthesized
guaugauuacuggccuuuuuc

SEQ ID NO: 82659 - RNA, 21 nt, Artificial Sequence
  Chemically synthesized
acaggauuggcgcuuuugggu

SEQ ID NO: 82660 - RNA, 21 nt, Artificial Sequence
  Chemically synthesized
uggaguguucagcaaagacca

SEQ ID NO: 82661 - RNA, 21 nt, Artificial Sequence
  Chemically synthesized
gcccacaguguuugagaacua

SEQ ID NO: 82662 - RNA, 21 nt, Artificial Sequence
  Chemically synthesized
cauggaguguucagcaaagac

SEQ ID NO: 82663 - RNA, 21 nt, Artificial Sequence
  Chemically synthesized
cuucuugcuucuuucuagaaa

SEQ ID NO: 82664 - RNA, 21 nt, Artificial Sequence
  Chemically synthesized
ccacaguguuugagaacuaug

SEQ ID NO: 82665 - RNA, 21 nt, Artificial Sequence
  Chemically synthesized
ccuacccagauaccgauguua

SEQ ID NO: 82666 - RNA, 21 nt, Artificial Sequence
  Chemically synthesized
aaaacaucccagaaaagugga

SEQ ID NO: 82667 - RNA, 21 nt, Artificial Sequence
  Chemically synthesized
uaguuuagaaaacaucccaga

SEQ ID NO: 82668 - RNA, 21 nt, Artificial Sequence
  Chemically synthesized
ggugauuguuggugauggagc

SEQ ID NO: 82669 - RNA, 21 nt, Artificial Sequence
  Chemically synthesized
uucucauggguggcacucagu

SEQ ID NO: 82670 - RNA, 21 nt, Artificial Sequence
  Chemically synthesized
acauggaguguucagcaaaga

SEQ ID NO: 82671 - RNA, 21 nt, Artificial Sequence
  Chemically synthesized
cuguaccaguuaauuuuucca

SEQ ID NO: 82672 - RNA, 21 nt, Artificial Sequence
  Chemically synthesized
uuuugaaaaugggcucaacca

SEQ ID NO: 82673 - RNA, 21 nt, Artificial Sequence
  Chemically synthesized
agcuguggcagaguuacaguu

SEQ ID NO: 82674 - RNA, 21 nt, Artificial Sequence
  Chemically synthesized
cagguagaguuggcuuugugg

SEQ ID NO: 82675 - RNA, 21 nt, Artificial Sequence
  Chemically synthesized
gugaauuaggcuguaacuacu

SEQ ID NO: 82676 - RNA, 21 nt, Artificial Sequence
  Chemically synthesized
ucggaaugaugagcacacaag

SEQ ID NO: 82677 - RNA, 21 nt, Artificial Sequence
  Chemically synthesized
cccacaguguuugagaacuau

SEQ ID NO: 82678 - RNA, 21 nt, Artificial Sequence
  Chemically synthesized
uaagcaucuggcucuaauuca

SEQ ID NO: 82679 - RNA, 21 nt, Artificial Sequence
  Chemically synthesized
gucucaccuggacuuaagcau

SEQ ID NO: 82680 - RNA, 21 nt, Artificial Sequence
  Chemically synthesized
gauaguuuagaaaacauccca

SEQ ID NO: 82681 - RNA, 21 nt, Artificial Sequence
  Chemically synthesized
cuacccagauaccgauguuau

SEQ ID NO: 82682 - RNA, 21 nt, Artificial Sequence
  Chemically synthesized
gagucaccacuucagggcuuu

SEQ ID NO: 82683 - RNA, 21 nt, Artificial Sequence
  Chemically synthesized
gagagagguuuuugaaauggc

SEQ ID NO: 82684 - RNA, 21 nt, Artificial Sequence
  Chemically synthesized
aguucugugguuucauguuag

SEQ ID NO: 82685 - RNA, 21 nt, Artificial Sequence
  Chemically synthesized
auggagcugggcuaaguaaau

SEQ ID NO: 82686 - RNA, 21 nt, Artificial Sequence
  Chemically synthesized
aagucaagcauuucuguccca

SEQ ID NO: 82687 - RNA, 21 nt, Artificial Sequence
  Chemically synthesized
uguggcagauaucgaggugga

SEQ ID NO: 82688 - RNA, 21 nt, Artificial Sequence
  Chemically synthesized
cuggugauuguuggugaugga

SEQ ID NO: 82689 - RNA, 21 nt, Artificial Sequence
  Chemically synthesized
uguccugccuauuaucuguca

SEQ ID NO: 82690 - RNA, 21 nt, Artificial Sequence
  Chemically synthesized
agagguguaugugcccacagu

SEQ ID NO: 82691 - RNA, 21 nt, Artificial Sequence
  Chemically synthesized
ccuaagauuacaaaucagaag

SEQ ID NO: 82692 - RNA, 21 nt, Artificial Sequence
  Chemically synthesized
caguguuugagaacuaugugg

SEQ ID NO: 82693 - RNA, 21 nt, Artificial Sequence
  Chemically synthesized
ccgauguuauacugauguguu

SEQ ID NO: 82694 - RNA, 21 nt, Artificial Sequence
  Chemically synthesized
agagguuuuugaaauggcuac

SEQ ID NO: 82695 - RNA, 21 nt, Artificial Sequence
  Chemically synthesized
uaacuaacauguccugccuau

SEQ ID NO: 82696 - RNA, 21 nt, Artificial Sequence
  Chemically synthesized
guaauuagugccacuuaaugu

SEQ ID NO: 82697 - RNA, 21 nt, Artificial Sequence
  Chemically synthesized
cuugcucauagucuucagcaa

SEQ ID NO: 82698 - RNA, 21 nt, Artificial Sequence
  Chemically synthesized
uuccuaauacugucauccuca

SEQ ID NO: 82699 - RNA, 21 nt, Artificial Sequence
  Chemically synthesized
uggugauuguuggugauggag

SEQ ID NO: 82700 - RNA, 21 nt, Artificial Sequence
  Chemically synthesized
auggagccuguggaaagacau

SEQ ID NO: 82701 - RNA, 21 nt, Artificial Sequence
  Chemically synthesized
ccagaagucaagcauuucugu

SEQ ID NO: 82702 - RNA, 21 nt, Artificial Sequence
  Chemically synthesized
aucugucagcugcaagguacu

SEQ ID NO: 82703 - RNA, 21 nt, Artificial Sequence
  Chemically synthesized
uguuuuuccaucgacagcccu

SEQ ID NO: 82704 - RNA, 21 nt, Artificial Sequence
  Chemically synthesized
aacaguugguaacuuuuguga

SEQ ID NO: 82705 - RNA, 21 nt, Artificial Sequence
  Chemically synthesized
gcucauagucuucagcaagga

SEQ ID NO: 82706 - RNA, 21 nt, Artificial Sequence
  Chemically synthesized
cggauucguugccugagcaau

SEQ ID NO: 82707 - RNA, 21 nt, Artificial Sequence
  Chemically synthesized
accugaagaaggcagagauau

SEQ ID NO: 82708 - RNA, 21 nt, Artificial Sequence
  Chemically synthesized
cauagucuucagcaaggacca

SEQ ID NO: 82709 - RNA, 21 nt, Artificial Sequence
  Chemically synthesized
aggaagauuaugaucgccuga

SEQ ID NO: 82710 - RNA, 21 nt, Artificial Sequence
  Chemically synthesized
gaaaaaaucugggugccuugu

SEQ ID NO: 82711 - RNA, 21 nt, Artificial Sequence
  Chemically synthesized
gccacuuaauguauguuacca

SEQ ID NO: 82712 - RNA, 21 nt, Artificial Sequence
  Chemically synthesized
ucugugguuucauguuaguua

SEQ ID NO: 82713 - RNA, 21 nt, Artificial Sequence
  Chemically synthesized
cagaguuacaguucugugguu

SEQ ID NO: 82714 - RNA, 21 nt, Artificial Sequence
  Chemically synthesized
agucaccacuucagggcuuua

SEQ ID NO: 82715 - RNA, 21 nt, Artificial Sequence
  Chemically synthesized
gauuacuggccuuuuucauuu

SEQ ID NO: 82716 - RNA, 21 nt, Artificial Sequence
  Chemically synthesized
guguucagcaaagaccaaaga

SEQ ID NO: 82717 - RNA, 21 nt, Artificial Sequence
  Chemically synthesized
ugugcccacaguguuugagaa

SEQ ID NO: 82718 - RNA, 21 nt, Artificial Sequence
  Chemically synthesized
acugauguguuuuuccaucga

SEQ ID NO: 82719 - RNA, 21 nt, Artificial Sequence
  Chemically synthesized
caagguacucuggugagucac

SEQ ID NO: 82720 - RNA, 21 nt, Artificial Sequence
  Chemically synthesized
caucuugcuaccaguauuuag

SEQ ID NO: 82721 - RNA, 21 nt, Artificial Sequence
  Chemically synthesized
cccagacuagauguaguauuu

SEQ ID NO: 82722 - RNA, 21 nt, Artificial Sequence
  Chemically synthesized
gaguuacaguucugugguuuc

SEQ ID NO: 82723 - RNA, 21 nt, Artificial Sequence
  Chemically synthesized
ugcagcuguggcagaguuaca

SEQ ID NO: 82724 - RNA, 21 nt, Artificial Sequence
  Chemically synthesized
uaucgagguggauggaaagca

SEQ ID NO: 82725 - RNA, 21 nt, Artificial Sequence
  Chemically synthesized
agcaucuggcucuaauucaca

SEQ ID NO: 82726 - RNA, 21 nt, Artificial Sequence
  Chemically synthesized
ccuugucuugugaaaccuugc

SEQ ID NO: 82727 - RNA, 21 nt, Artificial Sequence
  Chemically synthesized
ugggcuaaguaaauaggaauu

SEQ ID NO: 82728 - RNA, 21 nt, Artificial Sequence
  Chemically synthesized
aacuucuugcuucuuucuaga

SEQ ID NO: 82729 - RNA, 21 nt, Artificial Sequence
  Chemically synthesized
gagaacuauguggcagauauc

SEQ ID NO: 82730 - RNA, 21 nt, Artificial Sequence
  Chemically synthesized
ucaucuugcuaccaguauuua

SEQ ID NO: 82731 - RNA, 21 nt, Artificial Sequence
  Chemically synthesized
cuuucuagaaagagaaacagu

SEQ ID NO: 82732 - RNA, 21 nt, Artificial Sequence
  Chemically synthesized
aagauggagugagagagguuu

SEQ ID NO: 82733 - RNA, 21 nt, Artificial Sequence
  Chemically synthesized
caaguucaugcagcuguggca

SEQ ID NO: 82734 - RNA, 21 nt, Artificial Sequence
  Chemically synthesized
uuggugauggagccuguggaa

SEQ ID NO: 82735 - RNA, 21 nt, Artificial Sequence
  Chemically synthesized
uugugaauuaggcuguaacua

SEQ ID NO: 82736 - RNA, 21 nt, Artificial Sequence
  Chemically synthesized
gauggaaagcagguagaguug

SEQ ID NO: 82737 - RNA, 21 nt, Artificial Sequence
  Chemically synthesized
guuacuguguaauuagugcca

SEQ ID NO: 82738 - RNA, 21 nt, Artificial Sequence
  Chemically synthesized
uuuggguacauggaguguuca

SEQ ID NO: 82739 - RNA, 21 nt, Artificial Sequence
  Chemically synthesized
cgugggaagaaaaaaucuggg

SEQ ID NO: 82740 - RNA, 21 nt, Artificial Sequence
  Chemically synthesized
agucaucuugcuaccaguauu

SEQ ID NO: 82741 - RNA, 21 nt, Artificial Sequence
  Chemically synthesized
aaaccugaagaaggcagagau

SEQ ID NO: 82742 - RNA, 21 nt, Artificial Sequence
  Chemically synthesized
uuuccaucgacagcccugaua

SEQ ID NO: 82743 - RNA, 21 nt, Artificial Sequence
  Chemically synthesized
uuggguacauggaguguucag

SEQ ID NO: 82744 - RNA, 21 nt, Artificial Sequence
  Chemically synthesized
aagaaacuggugauuguuggu

SEQ ID NO: 82745 - RNA, 21 nt, Artificial Sequence
  Chemically synthesized
guaacuuuugugaauuaggcu

SEQ ID NO: 82746 - RNA, 21 nt, Artificial Sequence
  Chemically synthesized
ccugaagaaggcagagauaug

SEQ ID NO: 82747 - RNA, 21 nt, Artificial Sequence
  Chemically synthesized
ggaaagcagguagaguuggcu

SEQ ID NO: 82748 - RNA, 21 nt, Artificial Sequence
  Chemically synthesized
uaguguaugauuacuggccuu

SEQ ID NO: 82749 - RNA, 21 nt, Artificial Sequence
  Chemically synthesized
cauccucaaagaaaguguauu

SEQ ID NO: 82750 - RNA, 21 nt, Artificial Sequence
  Chemically synthesized
aggcuguaacuacuuuauaac

SEQ ID NO: 82751 - RNA, 21 nt, Artificial Sequence
  Chemically synthesized
cagcaaagaccaaagauggag

SEQ ID NO: 82752 - RNA, 21 nt, Artificial Sequence
  Chemically synthesized
ggauucguugccugagcaaug

SEQ ID NO: 82753 - RNA, 21 nt, Artificial Sequence
  Chemically synthesized
gugauggagccuguggaaaga

SEQ ID NO: 82754 - RNA, 21 nt, Artificial Sequence
  Chemically synthesized
aucgacagcccugauaguuua

SEQ ID NO: 82755 - RNA, 21 nt, Artificial Sequence
  Chemically synthesized
acuaacauguccugccuauua

SEQ ID NO: 82756 - RNA, 21 nt, Artificial Sequence
  Chemically synthesized
cuucggaaugaugagcacaca

SEQ ID NO: 82757 - RNA, 21 nt, Artificial Sequence
  Chemically synthesized
accaaagauggagugagagag

SEQ ID NO: 82758 - RNA, 21 nt, Artificial Sequence
  Chemically synthesized
cuugcuaccaguauuuagaag

SEQ ID NO: 82759 - RNA, 21 nt, Artificial Sequence
  Chemically synthesized
uacuggccuuuuucauuuauc

SEQ ID NO: 82760 - RNA, 21 nt, Artificial Sequence
  Chemically synthesized
ucugauaaaagauggccauau

SEQ ID NO: 82761 - RNA, 21 nt, Artificial Sequence
  Chemically synthesized
gaagaaacuggugauuguugg

SEQ ID NO: 82762 - RNA, 21 nt, Artificial Sequence
  Chemically synthesized
cuaauacugucauccucaaag

SEQ ID NO: 82763 - RNA, 21 nt, Artificial Sequence
  Chemically synthesized
cuuuggaagauggcauaaccu

SEQ ID NO: 82764 - RNA, 21 nt, Artificial Sequence
  Chemically synthesized
cagcuguggcagaguuacagu

SEQ ID NO: 82765 - RNA, 21 nt, Artificial Sequence
  Chemically synthesized
guuaguccacggucuggucuu

SEQ ID NO: 82766 - RNA, 21 nt, Artificial Sequence
  Chemically synthesized
cagcugggcaggaagauuaug

SEQ ID NO: 82767 - RNA, 21 nt, Artificial Sequence
  Chemically synthesized
augauuacuggccuuuuucau

SEQ ID NO: 82768 - RNA, 21 nt, Artificial Sequence
  Chemically synthesized
acucagucucucuucucucca

SEQ ID NO: 82769 - RNA, 21 nt, Artificial Sequence
  Chemically synthesized
uucacgccugaggcaauuaga

SEQ ID NO: 82770 - RNA, 21 nt, Artificial Sequence
  Chemically synthesized
aguucucauggguggcacuca

SEQ ID NO: 82771 - RNA, 21 nt, Artificial Sequence
  Chemically synthesized
uugguuucacgccugaggcaa

SEQ ID NO: 82772 - RNA, 21 nt, Artificial Sequence
  Chemically synthesized
augaagcaggagccggugaaa

SEQ ID NO: 82773 - RNA, 21 nt, Artificial Sequence
  Chemically synthesized
uagacacuuuggaagauggca

SEQ ID NO: 82774 - RNA, 21 nt, Artificial Sequence
  Chemically synthesized
aguauuuagaagccaacuaug

SEQ ID NO: 82775 - RNA, 21 nt, Artificial Sequence
  Chemically synthesized
cuagaaagagaaacaguuggu

SEQ ID NO: 82776 - RNA, 21 nt, Artificial Sequence
  Chemically synthesized
acaguucugugguuucauguu

SEQ ID NO: 82777 - RNA, 21 nt, Artificial Sequence
  Chemically synthesized
cagaaaagcccaaguucaugc

SEQ ID NO: 82778 - RNA, 21 nt, Artificial Sequence
  Chemically synthesized
acuuuugugaauuaggcugua

SEQ ID NO: 82779 - RNA, 21 nt, Artificial Sequence
  Chemically synthesized
ccugauaguuuagaaaacauc

SEQ ID NO: 82780 - RNA, 21 nt, Artificial Sequence
  Chemically synthesized
cacaguguuugagaacuaugu

SEQ ID NO: 82781 - RNA, 21 nt, Artificial Sequence
  Chemically synthesized
agguggauggaaagcagguag

SEQ ID NO: 82782 - RNA, 21 nt, Artificial Sequence
  Chemically synthesized
acauguccugccuauuaucug

SEQ ID NO: 82783 - RNA, 21 nt, Artificial Sequence
  Chemically synthesized
ugaaaccuugcugcaagcaca

SEQ ID NO: 82784 - RNA, 21 nt, Artificial Sequence
  Chemically synthesized
uuggaaauaaagucagaugga

SEQ ID NO: 82785 - RNA, 21 nt, Artificial Sequence
  Chemically synthesized
uacugucauccucaaagaaag

SEQ ID NO: 82786 - RNA, 21 nt, Artificial Sequence
  Chemically synthesized
cacuuuggaagauggcauaac

SEQ ID NO: 82787 - RNA, 21 nt, Artificial Sequence
  Chemically synthesized
gacgugggaagaaaaaaucug

SEQ ID NO: 82788 - RNA, 21 nt, Artificial Sequence
  Chemically synthesized
aguguaugauuacuggccuuu

SEQ ID NO: 82789 - RNA, 21 nt, Artificial Sequence
  Chemically synthesized
ucuggugagucaccacuucag

SEQ ID NO: 82790 - RNA, 21 nt, Artificial Sequence
  Chemically synthesized
ugguaacuuuugugaauuagg

SEQ ID NO: 82791 - RNA, 21 nt, Artificial Sequence
  Chemically synthesized
gaaauggcuacgagagcugcu

SEQ ID NO: 82792 - RNA, 21 nt, Artificial Sequence
  Chemically synthesized
auugguuucacgccugaggca

SEQ ID NO: 82793 - RNA, 21 nt, Artificial Sequence
  Chemically synthesized
gaaagacaugcuugcucauag

SEQ ID NO: 82794 - RNA, 21 nt, Artificial Sequence
  Chemically synthesized
gauuauuaacgauguccaacc

SEQ ID NO: 82795 - RNA, 21 nt, Artificial Sequence
  Chemically synthesized
aacuauguggcagauaucgag

SEQ ID NO: 82796 - RNA, 21 nt, Artificial Sequence
  Chemically synthesized
uuggauuuccuaauacuguca

SEQ ID NO: 82797 - RNA, 21 nt, Artificial Sequence
  Chemically synthesized
gaaagcagguagaguuggcuu

SEQ ID NO: 82798 - RNA, 21 nt, Artificial Sequence
  Chemically synthesized
gagauauggcaaacaggauug

SEQ ID NO: 82799 - RNA, 21 nt, Artificial Sequence
  Chemically synthesized
guggauggaaagcagguagag

SEQ ID NO: 82800 - RNA, 21 nt, Artificial Sequence
  Chemically synthesized
uuuugugaauuaggcuguaac

SEQ ID NO: 82801 - RNA, 21 nt, Artificial Sequence
  Chemically synthesized
aaccugaagaaggcagagaua

SEQ ID NO: 82802 - RNA, 21 nt, Artificial Sequence
  Chemically synthesized
ugugaaaccuugcugcaagca

SEQ ID NO: 82803 - RNA, 21 nt, Artificial Sequence
  Chemically synthesized
gaaaagcccaaguucaugcag

SEQ ID NO: 82804 - RNA, 21 nt, Artificial Sequence
  Chemically synthesized
ccaguuaauuuuuccaacuac

SEQ ID NO: 82805 - RNA, 21 nt, Artificial Sequence
  Chemically synthesized
aaaugggcucaaccagaaaag

SEQ ID NO: 82806 - RNA, 21 nt, Artificial Sequence
  Chemically synthesized
cugacacaccaggcgcuaauu

SEQ ID NO: 82807 - RNA, 21 nt, Artificial Sequence
  Chemically synthesized
gauuuuguuggcauagcucug

SEQ ID NO: 82808 - RNA, 21 nt, Artificial Sequence
  Chemically synthesized
cugucucaccuggacuuaagc

SEQ ID NO: 82809 - RNA, 21 nt, Artificial Sequence
  Chemically synthesized
gauuacaaaucagaagucauc

SEQ ID NO: 82810 - RNA, 21 nt, Artificial Sequence
  Chemically synthesized
guggcacucagucucucuucu

SEQ ID NO: 82811 - RNA, 21 nt, Artificial Sequence
  Chemically synthesized
aagagaaacaguugguaacuu

SEQ ID NO: 82812 - RNA, 21 nt, Artificial Sequence
  Chemically synthesized
ucagcugcaagguacucuggu

SEQ ID NO: 82813 - RNA, 21 nt, Artificial Sequence
  Chemically synthesized
cuuaugcgguuaauuuugaag

SEQ ID NO: 82814 - RNA, 21 nt, Artificial Sequence
  Chemically synthesized
uugcuucuuucuagaaagaga

SEQ ID NO: 82815 - RNA, 21 nt, Artificial Sequence
  Chemically synthesized
aaccagaaaagcccaaguuca

SEQ ID NO: 82816 - RNA, 21 nt, Artificial Sequence
  Chemically synthesized
cucuccagcugacuaaacuuu

SEQ ID NO: 82817 - RNA, 21 nt, Artificial Sequence
  Chemically synthesized
ugauuauuaacgauguccaac

SEQ ID NO: 82818 - RNA, 21 nt, Artificial Sequence
  Chemically synthesized
agcccugauaguuuagaaaac

SEQ ID NO: 82819 - RNA, 21 nt, Artificial Sequence
  Chemically synthesized
cacaccaggcgcuaauucaag

SEQ ID NO: 82820 - RNA, 21 nt, Artificial Sequence
  Chemically synthesized
gcuaccaguauuuagaagcca

SEQ ID NO: 82821 - RNA, 21 nt, Artificial Sequence
  Chemically synthesized
guuuuuccaucgacagcccug

SEQ ID NO: 82822 - RNA, 21 nt, Artificial Sequence
  Chemically synthesized
ucucuucucuccagcugacua

SEQ ID NO: 82823 - RNA, 21 nt, Artificial Sequence
  Chemically synthesized
uaccaguauuuagaagccaac

SEQ ID NO: 82824 - RNA, 21 nt, Artificial Sequence
  Chemically synthesized
gcuuuuggguacauggagugu

SEQ ID NO: 82825 - RNA, 21 nt, Artificial Sequence
  Chemically synthesized
ggcagaguuacaguucugugg

SEQ ID NO: 82826 - RNA, 21 nt, Artificial Sequence
  Chemically synthesized
guguaugauuacuggccuuuu

SEQ ID NO: 82827 - RNA, 21 nt, Artificial Sequence
  Chemically synthesized
ugaagaaggcagagauauggc

SEQ ID NO: 82828 - RNA, 21 nt, Artificial Sequence
  Chemically synthesized
gaaugaugagcacacaaggcg

SEQ ID NO: 82829 - RNA, 21 nt, Artificial Sequence
  Chemically synthesized
caucuggcucuaauucacagu

SEQ ID NO: 82830 - RNA, 21 nt, Artificial Sequence
  Chemically synthesized
aaagaccaaagauggagugag

SEQ ID NO: 82831 - RNA, 21 nt, Artificial Sequence
  Chemically synthesized
guaccaguuaauuuuuccaac

SEQ ID NO: 82832 - RNA, 21 nt, Artificial Sequence
  Chemically synthesized
guggcagaguuacaguucugu

SEQ ID NO: 82833 - RNA, 21 nt, Artificial Sequence
  Chemically synthesized
uaaccugucucaccuggacuu

SEQ ID NO: 82834 - RNA, 21 nt, Artificial Sequence
  Chemically synthesized
agaaacaguugguaacuuuug

SEQ ID NO: 82835 - RNA, 21 nt, Artificial Sequence
  Chemically synthesized
gauuguuggugauggagccug

SEQ ID NO: 82836 - RNA, 21 nt, Artificial Sequence
  Chemically synthesized
cugucagcugcaagguacucu

SEQ ID NO: 82837 - RNA, 21 nt, Artificial Sequence
  Chemically synthesized
agaguuacaguucugugguuu

SEQ ID NO: 82838 - RNA, 21 nt, Artificial Sequence
  Chemically synthesized
ucucucacuccaucuuugguc

SEQ ID NO: 82839 - RNA, 21 nt, Artificial Sequence
  Chemically synthesized
uuucaaaaaccucucucacuc

SEQ ID NO: 82840 - RNA, 21 nt, Artificial Sequence
  Chemically synthesized
uuuacuuagcccagcuccaug

SEQ ID NO: 82841 - RNA, 21 nt, Artificial Sequence
  Chemically synthesized
uuuccaucugacuuuauuucc

SEQ ID NO: 82842 - RNA, 21 nt, Artificial Sequence
  Chemically synthesized
accucucucacuccaucuuug

SEQ ID NO: 82843 - RNA, 21 nt, Artificial Sequence
  Chemically synthesized
uuugcugaacacuccauguac

SEQ ID NO: 82844 - RNA, 21 nt, Artificial Sequence
  Chemically synthesized
uugguaacauacauuaagugg

SEQ ID NO: 82845 - RNA, 21 nt, Artificial Sequence
  Chemically synthesized
uuucucuuucuagaaagaagc

SEQ ID NO: 82846 - RNA, 21 nt, Artificial Sequence
  Chemically synthesized
ucaucauuccgaagauccuuc

SEQ ID NO: 82847 - RNA, 21 nt, Artificial Sequence
  Chemically synthesized
ucuaccugcuuuccauccacc

SEQ ID NO: 82848 - RNA, 21 nt, Artificial Sequence
  Chemically synthesized
uuacuuagcccagcuccaugg

SEQ ID NO: 82849 - RNA, 21 nt, Artificial Sequence
  Chemically synthesized
uugcugaacacuccauguacc

SEQ ID NO: 82850 - RNA, 21 nt, Artificial Sequence
  Chemically synthesized
uucuuauucccaaccaggaug

SEQ ID NO: 82851 - RNA, 21 nt, Artificial Sequence
  Chemically synthesized
uuggcuucuaaauacugguag

SEQ ID NO: 82852 - RNA, 21 nt, Artificial Sequence
  Chemically synthesized
auguuuucuaaacuaucaggg

SEQ ID NO: 82853 - RNA, 21 nt, Artificial Sequence
  Chemically synthesized
uucaaaaaccucucucacucc

SEQ ID NO: 82854 - RNA, 21 nt, Artificial Sequence
  Chemically synthesized
ucugccacauaguucucaaac

SEQ ID NO: 82855 - RNA, 21 nt, Artificial Sequence
  Chemically synthesized
uaacucugccacagcugcaug

SEQ ID NO: 82856 - RNA, 21 nt, Artificial Sequence
  Chemically synthesized
uuugccauaucucugccuucu

SEQ ID NO: 82857 - RNA, 21 nt, Artificial Sequence
  Chemically synthesized
uuuucuaaacuaucagggcug

SEQ ID NO: 82858 - RNA, 21 nt, Artificial Sequence
  Chemically synthesized
uuccauccaccucgauaucug

SEQ ID NO: 82859 - RNA, 21 nt, Artificial Sequence
  Chemically synthesized
uccuguuugccauaucucugc

SEQ ID NO: 82860 - RNA, 21 nt, Artificial Sequence
  Chemically synthesized
uuuccauccaccucgauaucu

SEQ ID NO: 82861 - RNA, 21 nt, Artificial Sequence
  Chemically synthesized
ucucguagccauuucaaaaac

SEQ ID NO: 82862 - RNA, 21 nt, Artificial Sequence
  Chemically synthesized
uuccuauuuacuuagcccagc

SEQ ID NO: 82863 - RNA, 21 nt, Artificial Sequence
  Chemically synthesized
auccuguuugccauaucucug

SEQ ID NO: 82864 - RNA, 21 nt, Artificial Sequence
  Chemically synthesized
ucgauaucugccacauaguuc

SEQ ID NO: 82865 - RNA, 21 nt, Artificial Sequence
  Chemically synthesized
ucccacaaagccaacucuacc

SEQ ID NO: 82866 - RNA, 21 nt, Artificial Sequence
  Chemically synthesized
ugccauaucucugccuucuuc

SEQ ID NO: 82867 - RNA, 21 nt, Artificial Sequence
  Chemically synthesized
cuauuuacuuagcccagcucc

SEQ ID NO: 82868 - RNA, 21 nt, Artificial Sequence
  Chemically synthesized
aaacacaucaguauaacaucg

SEQ ID NO: 82869 - RNA, 21 nt, Artificial Sequence
  Chemically synthesized
aaaaaccucucucacuccauc

SEQ ID NO: 82870 - RNA, 21 nt, Artificial Sequence
  Chemically synthesized
ucuagcuugcagagcagcucu

SEQ ID NO: 82871 - RNA, 21 nt, Artificial Sequence
  Chemically synthesized
uucuucagguuucaccggcuc

SEQ ID NO: 82872 - RNA, 21 nt, Artificial Sequence
  Chemically synthesized
aacucuaccugcuuuccaucc

SEQ ID NO: 82873 - RNA, 21 nt, Artificial Sequence
  Chemically synthesized
uacccaaaagcgccaauccug

SEQ ID NO: 82874 - RNA, 21 nt, Artificial Sequence
  Chemically synthesized
ugccuucuucagguuucaccg

SEQ ID NO: 82875 - RNA, 21 nt, Artificial Sequence
  Chemically synthesized
auuccuauuuacuuagcccag

SEQ ID NO: 82876 - RNA, 21 nt, Artificial Sequence
  Chemically synthesized
uaguuggcuucuaaauacugg

SEQ ID NO: 82877 - RNA, 21 nt, Artificial Sequence
  Chemically synthesized
uccaaagugucuaauugccuc

SEQ ID NO: 82878 - RNA, 21 nt, Artificial Sequence
  Chemically synthesized
uuuggucuuugcugaacacuc

SEQ ID NO: 82879 - RNA, 21 nt, Artificial Sequence
  Chemically synthesized
augagcaagcaugucuuucca

SEQ ID NO: 82880 - RNA, 21 nt, Artificial Sequence
  Chemically synthesized
uaaucuuccugcccagcugug

SEQ ID NO: 82881 - RNA, 21 nt, Artificial Sequence
  Chemically synthesized
ucaaaaaccucucucacucca

SEQ ID NO: 82882 - RNA, 21 nt, Artificial Sequence
  Chemically synthesized
auuaaguggcacuaauuacac

SEQ ID NO: 82883 - RNA, 21 nt, Artificial Sequence
  Chemically synthesized
aaaaguuaccaacuguuucuc

SEQ ID NO: 82884 - RNA, 21 nt, Artificial Sequence
  Chemically synthesized
uuucugggauguuuucuaaac

SEQ ID NO: 82885 - RNA, 21 nt, Artificial Sequence
  Chemically synthesized
uuucuuugaggaugacaguau

SEQ ID NO: 82886 - RNA, 21 nt, Artificial Sequence
  Chemically synthesized
uuggucuuugcugaacacucc

SEQ ID NO: 82887 - RNA, 21 nt, Artificial Sequence
  Chemically synthesized
uucuuugaggaugacaguauu

SEQ ID NO: 82888 - RNA, 21 nt, Artificial Sequence
  Chemically synthesized
ccuguuugccauaucucugcc

SEQ ID NO: 82889 - RNA, 21 nt, Artificial Sequence
  Chemically synthesized
auaaucuuccugcccagcugu

SEQ ID NO: 82890 - RNA, 21 nt, Artificial Sequence
  Chemically synthesized
uacugguagcaagaugacuuc

SEQ ID NO: 82891 - RNA, 21 nt, Artificial Sequence
  Chemically synthesized
ugacucaccagaguaccuugc

SEQ ID NO: 82892 - RNA, 21 nt, Artificial Sequence
  Chemically synthesized
uaaguggcacuaauuacacag

SEQ ID NO: 82893 - RNA, 21 nt, Artificial Sequence
  Chemically synthesized
ucauaaucuuccugcccagcu

SEQ ID NO: 82894 - RNA, 21 nt, Artificial Sequence
  Chemically synthesized
ugucuuuccacaggcuccauc

SEQ ID NO: 82895 - RNA, 21 nt, Artificial Sequence
  Chemically synthesized
ugcugaacacuccauguaccc

SEQ ID NO: 82896 - RNA, 21 nt, Artificial Sequence
  Chemically synthesized
uccuauuuacuuagcccagcu

SEQ ID NO: 82897 - RNA, 21 nt, Artificial Sequence
  Chemically synthesized
augagaacugguggcuccucu

SEQ ID NO: 82898 - RNA, 21 nt, Artificial Sequence
  Chemically synthesized
aguauaacaucgguaucuggg

SEQ ID NO: 82899 - RNA, 21 nt, Artificial Sequence
  Chemically synthesized
caacaaucaccaguuucuucc

SEQ ID NO: 82900 - RNA, 21 nt, Artificial Sequence
  Chemically synthesized
uuucuuccggauggcagccau

SEQ ID NO: 82901 - RNA, 21 nt, Artificial Sequence
  Chemically synthesized
aaaguuaccaacuguuucucu

SEQ ID NO: 82902 - RNA, 21 nt, Artificial Sequence
  Chemically synthesized
aaacuaucagggcugucgaug

SEQ ID NO: 82903 - RNA, 21 nt, Artificial Sequence
  Chemically synthesized
uuucuaaacuaucagggcugu

SEQ ID NO: 82904 - RNA, 21 nt, Artificial Sequence
  Chemically synthesized
acaaucaccaguuucuuccgg

SEQ ID NO: 82905 - RNA, 21 nt, Artificial Sequence
  Chemically synthesized
ugucccacaaagccaacucua

SEQ ID NO: 82906 - RNA, 21 nt, Artificial Sequence
  Chemically synthesized
uguacccaaaagcgccaaucc

SEQ ID NO: 82907 - RNA, 21 nt, Artificial Sequence
  Chemically synthesized
aucauaaucuuccugcccagc

SEQ ID NO: 82908 - RNA, 21 nt, Artificial Sequence
  Chemically synthesized
uuacagccuaauucacaaaag

SEQ ID NO: 82909 - RNA, 21 nt, Artificial Sequence
  Chemically synthesized
ugaagacuaugagcaagcaug

SEQ ID NO: 82910 - RNA, 21 nt, Artificial Sequence
  Chemically synthesized
uuuccacaggcuccaucacca

SEQ ID NO: 82911 - RNA, 21 nt, Artificial Sequence
  Chemically synthesized
uuuucugguugagcccauuuu

SEQ ID NO: 82912 - RNA, 21 nt, Artificial Sequence
  Chemically synthesized
uuaaguccaggugagacaggu

SEQ ID NO: 82913 - RNA, 21 nt, Artificial Sequence
  Chemically synthesized
aguuauaaaguaguuacagcc

SEQ ID NO: 82914 - RNA, 21 nt, Artificial Sequence
  Chemically synthesized
uucacaaaaguuaccaacugu

SEQ ID NO: 82915 - RNA, 21 nt, Artificial Sequence
  Chemically synthesized
auccaccucgauaucugccac

SEQ ID NO: 82916 - RNA, 21 nt, Artificial Sequence
  Chemically synthesized
auacugguagcaagaugacuu

SEQ ID NO: 82917 - RNA, 21 nt, Artificial Sequence
  Chemically synthesized
uucugggauguuuucuaaacu

SEQ ID NO: 82918 - RNA, 21 nt, Artificial Sequence
  Chemically synthesized
accaauuccuauuuacuuagc

SEQ ID NO: 82919 - RNA, 21 nt, Artificial Sequence
  Chemically synthesized
ugucuaauugccucaggcgug

SEQ ID NO: 82920 - RNA, 21 nt, Artificial Sequence
  Chemically synthesized
uuaccaacuguuucucuuucu

SEQ ID NO: 82921 - RNA, 21 nt, Artificial Sequence
  Chemically synthesized
auucacaaaaguuaccaacug

SEQ ID NO: 82922 - RNA, 21 nt, Artificial Sequence
  Chemically synthesized
aaaguaguuacagccuaauuc

SEQ ID NO: 82923 - RNA, 21 nt, Artificial Sequence
  Chemically synthesized
uucuaaacuaucagggcuguc

SEQ ID NO: 82924 - RNA, 21 nt, Artificial Sequence
  Chemically synthesized
acugguagcaagaugacuucu

SEQ ID NO: 82925 - RNA, 21 nt, Artificial Sequence
  Chemically synthesized
uuauucccaaccaggaugaug

SEQ ID NO: 82926 - RNA, 21 nt, Artificial Sequence
  Chemically synthesized
uucucuuucuagaaagaagca

SEQ ID NO: 82927 - RNA, 21 nt, Artificial Sequence
  Chemically synthesized
uugcagcaagguuucacaaga

SEQ ID NO: 82928 - RNA, 21 nt, Artificial Sequence
  Chemically synthesized
ucaguauaacaucgguaucug

SEQ ID NO: 82929 - RNA, 21 nt, Artificial Sequence
  Chemically synthesized
aacaaucaccaguuucuuccg

SEQ ID NO: 82930 - RNA, 21 nt, Artificial Sequence
  Chemically synthesized
aaguaguuacagccuaauuca

SEQ ID NO: 82931 - RNA, 21 nt, Artificial Sequence
  Chemically synthesized
auuagagccagaugcuuaagu

SEQ ID NO: 82932 - RNA, 21 nt, Artificial Sequence
  Chemically synthesized
guuaccaacuguuucucuuuc

SEQ ID NO: 82933 - RNA, 21 nt, Artificial Sequence
  Chemically synthesized
auguacccaaaagcgccaauc

SEQ ID NO: 82934 - RNA, 21 nt, Artificial Sequence
  Chemically synthesized
uaucugccacauaguucucaa

SEQ ID NO: 82935 - RNA, 21 nt, Artificial Sequence
  Chemically synthesized
uaagguaacuaacaugaaacc

SEQ ID NO: 82936 - RNA, 21 nt, Artificial Sequence
  Chemically synthesized
ucucacuccaucuuuggucuu

SEQ ID NO: 82937 - RNA, 21 nt, Artificial Sequence
  Chemically synthesized
cugccuucuucagguuucacc

SEQ ID NO: 82938 - RNA, 21 nt, Artificial Sequence
  Chemically synthesized
uugccauaucucugccuucuu

SEQ ID NO: 82939 - RNA, 21 nt, Artificial Sequence
  Chemically synthesized
guaauauggccaucuuuuauc

SEQ ID NO: 82940 - RNA, 21 nt, Artificial Sequence
  Chemically synthesized
aucuuuggucuuugcugaaca

SEQ ID NO: 82941 - RNA, 21 nt, Artificial Sequence
  Chemically synthesized
ugaaaaaggccaguaaucaua

SEQ ID NO: 82942 - RNA, 21 nt, Artificial Sequence
  Chemically synthesized
aucaguauaacaucgguaucu

SEQ ID NO: 82943 - RNA, 21 nt, Artificial Sequence
  Chemically synthesized
cucaggcgaucauaaucuucc

SEQ ID NO: 82944 - RNA, 21 nt, Artificial Sequence
  Chemically synthesized
uuccaucugacuuuauuucca

SEQ ID NO: 82945 - RNA, 21 nt, Artificial Sequence
  Chemically synthesized
aaaauacuacaucuagucugg

SEQ ID NO: 82946 - RNA, 21 nt, Artificial Sequence
  Chemically synthesized
uaacaugaaaccacagaacug

SEQ ID NO: 82947 - RNA, 21 nt, Artificial Sequence
  Chemically synthesized
aggcgaucauaaucuuccugc

SEQ ID NO: 82948 - RNA, 21 nt, Artificial Sequence
  Chemically synthesized
accucgauaucugccacauag

SEQ ID NO: 82949 - RNA, 21 nt, Artificial Sequence
  Chemically synthesized
uucuaaauacugguagcaaga

SEQ ID NO: 82950 - RNA, 21 nt, Artificial Sequence
  Chemically synthesized
uccauccaccucgauaucugc

SEQ ID NO: 82951 - RNA, 21 nt, Artificial Sequence
  Chemically synthesized
ugccacauaguucucaaacac

SEQ ID NO: 82952 - RNA, 21 nt, Artificial Sequence
  Chemically synthesized
uccauguacccaaaagcgcca

SEQ ID NO: 82953 - RNA, 21 nt, Artificial Sequence
  Chemically synthesized
uguuugccauaucucugccuu

SEQ ID NO: 82954 - RNA, 21 nt, Artificial Sequence
  Chemically synthesized
aauccuguuugccauaucucu

SEQ ID NO: 82955 - RNA, 21 nt, Artificial Sequence
  Chemically synthesized
uucccacgucuagcuugcaga

SEQ ID NO: 82956 - RNA, 21 nt, Artificial Sequence
  Chemically synthesized
uuaaguggcacuaauuacaca

SEQ ID NO: 82957 - RNA, 21 nt, Artificial Sequence
  Chemically synthesized
ugaauuagcgccugguguguc

SEQ ID NO: 82958 - RNA, 21 nt, Artificial Sequence
  Chemically synthesized
ugagcaagcaugucuuuccac

SEQ ID NO: 82959 - RNA, 21 nt, Artificial Sequence
  Chemically synthesized
ucugccuucuucagguuucac

SEQ ID NO: 82960 - RNA, 21 nt, Artificial Sequence
  Chemically synthesized
uguuuucuaaacuaucagggc

SEQ ID NO: 82961 - RNA, 21 nt, Artificial Sequence
  Chemically synthesized
agagcuaugccaacaaaaucu

SEQ ID NO: 82962 - RNA, 21 nt, Artificial Sequence
  Chemically synthesized
uaugagcaagcaugucuuucc

SEQ ID NO: 82963 - RNA, 21 nt, Artificial Sequence
  Chemically synthesized
auaucugccacauaguucuca

SEQ ID NO: 82964 - RNA, 21 nt, Artificial Sequence
  Chemically synthesized
cacaaagccaacucuaccugc

SEQ ID NO: 82965 - RNA, 21 nt, Artificial Sequence
  Chemically synthesized
uauuuacuuagcccagcucca

SEQ ID NO: 82966 - RNA, 21 nt, Artificial Sequence
  Chemically synthesized
uccaucuuuggucuuugcuga

SEQ ID NO: 82967 - RNA, 21 nt, Artificial Sequence
  Chemically synthesized
auuucaaaaaccucucucacu

SEQ ID NO: 82968 - RNA, 21 nt, Artificial Sequence
  Chemically synthesized
ucugccacagcugcaugaacu

SEQ ID NO: 82969 - RNA, 21 nt, Artificial Sequence
  Chemically synthesized
acaaaaguuaccaacuguuuc

SEQ ID NO: 82970 - RNA, 21 nt, Artificial Sequence
  Chemically synthesized
augaaaccacagaacuguaac

SEQ ID NO: 82971 - RNA, 21 nt, Artificial Sequence
  Chemically synthesized
uaggcaggacauguuaguuau

SEQ ID NO: 82972 - RNA, 21 nt, Artificial Sequence
  Chemically synthesized
acuccauguacccaaaagcgc

SEQ ID NO: 82973 - RNA, 21 nt, Artificial Sequence
  Chemically synthesized
ucugguugagcccauuuucaa

SEQ ID NO: 82974 - RNA, 21 nt, Artificial Sequence
  Chemically synthesized
uaccugcuuuccauccaccuc

SEQ ID NO: 82975 - RNA, 21 nt, Artificial Sequence
  Chemically synthesized
cuuuccauccaccucgauauc

SEQ ID NO: 82976 - RNA, 21 nt, Artificial Sequence
  Chemically synthesized
acuaacaugaaaccacagaac

SEQ ID NO: 82977 - RNA, 21 nt, Artificial Sequence
  Chemically synthesized
uaccuugcagcugacagauaa

SEQ ID NO: 82978 - RNA, 21 nt, Artificial Sequence
  Chemically synthesized
uauaacaucgguaucugggua

SEQ ID NO: 82979 - RNA, 21 nt, Artificial Sequence
  Chemically synthesized
ucacaagacaaggcacccaga

SEQ ID NO: 82980 - RNA, 21 nt, Artificial Sequence
  Chemically synthesized
ugugucccacaaagccaacuc

SEQ ID NO: 82981 - RNA, 21 nt, Artificial Sequence
  Chemically synthesized
uaacauacauuaaguggcacu

SEQ ID NO: 82982 - RNA, 21 nt, Artificial Sequence
  Chemically synthesized
ucaccagaguaccuugcagcu

SEQ ID NO: 82983 - RNA, 21 nt, Artificial Sequence
  Chemically synthesized
cacuccauguacccaaaagcg

SEQ ID NO: 82984 - RNA, 21 nt, Artificial Sequence
  Chemically synthesized
aaaagcgccaauccuguuugc

SEQ ID NO: 82985 - RNA, 21 nt, Artificial Sequence
  Chemically synthesized
aucgguaucuggguaggagag

SEQ ID NO: 82986 - RNA, 21 nt, Artificial Sequence
  Chemically synthesized
ucaccaacaaucaccaguuuc

SEQ ID NO: 82987 - RNA, 21 nt, Artificial Sequence
  Chemically synthesized
ucaccaguuucuuccggaugg

SEQ ID NO: 82988 - RNA, 21 nt, Artificial Sequence
  Chemically synthesized
acacugugggcacauacaccu

SEQ ID NO: 82989 - RNA, 21 nt, Artificial Sequence
  Chemically synthesized
ucucugccuucuucagguuuc

SEQ ID NO: 82990 - RNA, 21 nt, Artificial Sequence
  Chemically synthesized
ugcugaagacuaugagcaagc

SEQ ID NO: 82991 - RNA, 21 nt, Artificial Sequence
  Chemically synthesized
gaaaaaggccaguaaucauac

SEQ ID NO: 82992 - RNA, 21 nt, Artificial Sequence
  Chemically synthesized
acccaaaagcgccaauccugu

SEQ ID NO: 82993 - RNA, 21 nt, Artificial Sequence
  Chemically synthesized
uggucuuugcugaacacucca

SEQ ID NO: 82994 - RNA, 21 nt, Artificial Sequence
  Chemically synthesized
uaguucucaaacacugugggc

SEQ ID NO: 82995 - RNA, 21 nt, Artificial Sequence
  Chemically synthesized
gucuuugcugaacacuccaug

SEQ ID NO: 82996 - RNA, 21 nt, Artificial Sequence
  Chemically synthesized
uuucuagaaagaagcaagaag

SEQ ID NO: 82997 - RNA, 21 nt, Artificial Sequence
  Chemically synthesized
cauaguucucaaacacugugg

SEQ ID NO: 82998 - RNA, 21 nt, Artificial Sequence
  Chemically synthesized
uaacaucgguaucuggguagg

SEQ ID NO: 82999 - RNA, 21 nt, Artificial Sequence
  Chemically synthesized
uccacuuuucugggauguuuu

SEQ ID NO: 83000 - RNA, 21 nt, Artificial Sequence
  Chemically synthesized
ucugggauguuuucuaaacua

SEQ ID NO: 83001 - RNA, 21 nt, Artificial Sequence
  Chemically synthesized
gcuccaucaccaacaaucacc

SEQ ID NO: 83002 - RNA, 21 nt, Artificial Sequence
  Chemically synthesized
acugagugccacccaugagaa

SEQ ID NO: 83003 - RNA, 21 nt, Artificial Sequence
  Chemically synthesized
ucuuugcugaacacuccaugu

SEQ ID NO: 83004 - RNA, 21 nt, Artificial Sequence
  Chemically synthesized
uggaaaaauuaacugguacag

SEQ ID NO: 83005 - RNA, 21 nt, Artificial Sequence
  Chemically synthesized
ugguugagcccauuuucaaaa

SEQ ID NO: 83006 - RNA, 21 nt, Artificial Sequence
  Chemically synthesized
aacuguaacucugccacagcu

SEQ ID NO: 83007 - RNA, 21 nt, Artificial Sequence
  Chemically synthesized
ccacaaagccaacucuaccug

SEQ ID NO: 83008 - RNA, 21 nt, Artificial Sequence
  Chemically synthesized
aguaguuacagccuaauucac

SEQ ID NO: 83009 - RNA, 21 nt, Artificial Sequence
  Chemically synthesized
cuugugugcucaucauuccga

SEQ ID NO: 83010 - RNA, 21 nt, Artificial Sequence
  Chemically synthesized
auaguucucaaacacuguggg

SEQ ID NO: 83011 - RNA, 21 nt, Artificial Sequence
  Chemically synthesized
ugaauuagagccagaugcuua

SEQ ID NO: 83012 - RNA, 21 nt, Artificial Sequence
  Chemically synthesized
augcuuaaguccaggugagac

SEQ ID NO: 83013 - RNA, 21 nt, Artificial Sequence
  Chemically synthesized
ugggauguuuucuaaacuauc

SEQ ID NO: 83014 - RNA, 21 nt, Artificial Sequence
  Chemically synthesized
auaacaucgguaucuggguag

SEQ ID NO: 83015 - RNA, 21 nt, Artificial Sequence
  Chemically synthesized
aaagcccugaaguggugacuc

SEQ ID NO: 83016 - RNA, 21 nt, Artificial Sequence
  Chemically synthesized
gccauuucaaaaaccucucuc

SEQ ID NO: 83017 - RNA, 21 nt, Artificial Sequence
  Chemically synthesized
cuaacaugaaaccacagaacu

SEQ ID NO: 83018 - RNA, 21 nt, Artificial Sequence
  Chemically synthesized
auuuacuuagcccagcuccau

SEQ ID NO: 83019 - RNA, 21 nt, Artificial Sequence
  Chemically synthesized
ugggacagaaaugcuugacuu

SEQ ID NO: 83020 - RNA, 21 nt, Artificial Sequence
  Chemically synthesized
uccaccucgauaucugccaca

SEQ ID NO: 83021 - RNA, 21 nt, Artificial Sequence
  Chemically synthesized
uccaucaccaacaaucaccag

SEQ ID NO: 83022 - RNA, 21 nt, Artificial Sequence
  Chemically synthesized
ugacagauaauaggcaggaca

SEQ ID NO: 83023 - RNA, 21 nt, Artificial Sequence
  Chemically synthesized
acugugggcacauacaccucu

SEQ ID NO: 83024 - RNA, 21 nt, Artificial Sequence
  Chemically synthesized
cuucugauuuguaaucuuagg

SEQ ID NO: 83025 - RNA, 21 nt, Artificial Sequence
  Chemically synthesized
ccacauaguucucaaacacug

SEQ ID NO: 83026 - RNA, 21 nt, Artificial Sequence
  Chemically synthesized
aacacaucaguauaacaucgg

SEQ ID NO: 83027 - RNA, 21 nt, Artificial Sequence
  Chemically synthesized
guagccauuucaaaaaccucu

SEQ ID NO: 83028 - RNA, 21 nt, Artificial Sequence
  Chemically synthesized
auaggcaggacauguuaguua

SEQ ID NO: 83029 - RNA, 21 nt, Artificial Sequence
  Chemically synthesized
acauuaaguggcacuaauuac

SEQ ID NO: 83030 - RNA, 21 nt, Artificial Sequence
  Chemically synthesized
uugcugaagacuaugagcaag

SEQ ID NO: 83031 - RNA, 21 nt, Artificial Sequence
  Chemically synthesized
ugaggaugacaguauuaggaa

SEQ ID NO: 83032 - RNA, 21 nt, Artificial Sequence
  Chemically synthesized
cuccaucaccaacaaucacca

SEQ ID NO: 83033 - RNA, 21 nt, Artificial Sequence
  Chemically synthesized
augucuuuccacaggcuccau

SEQ ID NO: 83034 - RNA, 21 nt, Artificial Sequence
  Chemically synthesized
acagaaaugcuugacuucugg

SEQ ID NO: 83035 - RNA, 21 nt, Artificial Sequence
  Chemically synthesized
aguaccuugcagcugacagau

SEQ ID NO: 83036 - RNA, 21 nt, Artificial Sequence
  Chemically synthesized
agggcugucgauggaaaaaca

SEQ ID NO: 83037 - RNA, 21 nt, Artificial Sequence
  Chemically synthesized
ucacaaaaguuaccaacuguu

SEQ ID NO: 83038 - RNA, 21 nt, Artificial Sequence
  Chemically synthesized
uccuugcugaagacuaugagc

SEQ ID NO: 83039 - RNA, 21 nt, Artificial Sequence
  Chemically synthesized
auugcucaggcaacgaauccg

SEQ ID NO: 83040 - RNA, 21 nt, Artificial Sequence
  Chemically synthesized
auaucucugccuucuucaggu

SEQ ID NO: 83041 - RNA, 21 nt, Artificial Sequence
  Chemically synthesized
ugguccuugcugaagacuaug

SEQ ID NO: 83042 - RNA, 21 nt, Artificial Sequence
  Chemically synthesized
ucaggcgaucauaaucuuccu

SEQ ID NO: 83043 - RNA, 21 nt, Artificial Sequence
  Chemically synthesized
acaaggcacccagauuuuuuc

SEQ ID NO: 83044 - RNA, 21 nt, Artificial Sequence
  Chemically synthesized
ugguaacauacauuaaguggc

SEQ ID NO: 83045 - RNA, 21 nt, Artificial Sequence
  Chemically synthesized
uaacuaacaugaaaccacaga

SEQ ID NO: 83046 - RNA, 21 nt, Artificial Sequence
  Chemically synthesized
aaccacagaacuguaacucug

SEQ ID NO: 83047 - RNA, 21 nt, Artificial Sequence
  Chemically synthesized
uaaagcccugaaguggugacu

SEQ ID NO: 83048 - RNA, 21 nt, Artificial Sequence
  Chemically synthesized
aaaugaaaaaggccaguaauc

SEQ ID NO: 83049 - RNA, 21 nt, Artificial Sequence
  Chemically synthesized
ucuuuggucuuugcugaacac

SEQ ID NO: 83050 - RNA, 21 nt, Artificial Sequence
  Chemically synthesized
uucucaaacacugugggcaca

SEQ ID NO: 83051 - RNA, 21 nt, Artificial Sequence
  Chemically synthesized
ucgauggaaaaacacaucagu

SEQ ID NO: 83052 - RNA, 21 nt, Artificial Sequence
  Chemically synthesized
gugacucaccagaguaccuug

SEQ ID NO: 83053 - RNA, 21 nt, Artificial Sequence
  Chemically synthesized
cuaaauacugguagcaagaug

SEQ ID NO: 83054 - RNA, 21 nt, Artificial Sequence
  Chemically synthesized
aaauacuacaucuagucuggg

SEQ ID NO: 83055 - RNA, 21 nt, Artificial Sequence
  Chemically synthesized
gaaaccacagaacuguaacuc

SEQ ID NO: 83056 - RNA, 21 nt, Artificial Sequence
  Chemically synthesized
uguaacucugccacagcugca

SEQ ID NO: 83057 - RNA, 21 nt, Artificial Sequence
  Chemically synthesized
ugcuuuccauccaccucgaua

SEQ ID NO: 83058 - RNA, 21 nt, Artificial Sequence
  Chemically synthesized
ugugaauuagagccagaugcu

SEQ ID NO: 83059 - RNA, 21 nt, Artificial Sequence
  Chemically synthesized
gcaagguuucacaagacaagg

SEQ ID NO: 83060 - RNA, 21 nt, Artificial Sequence
  Chemically synthesized
aauuccuauuuacuuagccca

SEQ ID NO: 83061 - RNA, 21 nt, Artificial Sequence
  Chemically synthesized
ucuagaaagaagcaagaaguu

SEQ ID NO: 83062 - RNA, 21 nt, Artificial Sequence
  Chemically synthesized
gauaucugccacauaguucuc

SEQ ID NO: 83063 - RNA, 21 nt, Artificial Sequence
  Chemically synthesized
uaaauacugguagcaagauga

SEQ ID NO: 83064 - RNA, 21 nt, Artificial Sequence
  Chemically synthesized
acuguuucucuuucuagaaag

SEQ ID NO: 83065 - RNA, 21 nt, Artificial Sequence
  Chemically synthesized
aaaccucucucacuccaucuu

SEQ ID NO: 83066 - RNA, 21 nt, Artificial Sequence
  Chemically synthesized
ugccacagcugcaugaacuug

SEQ ID NO: 83067 - RNA, 21 nt, Artificial Sequence
  Chemically synthesized
uuccacaggcuccaucaccaa

SEQ ID NO: 83068 - RNA, 21 nt, Artificial Sequence
  Chemically synthesized
uaguuacagccuaauucacaa

SEQ ID NO: 83069 - RNA, 21 nt, Artificial Sequence
  Chemically synthesized
caacucuaccugcuuuccauc

SEQ ID NO: 83070 - RNA, 21 nt, Artificial Sequence
  Chemically synthesized
uggcacuaauuacacaguaac

SEQ ID NO: 83071 - RNA, 21 nt, Artificial Sequence
  Chemically synthesized
ugaacacuccauguacccaaa

SEQ ID NO: 83072 - RNA, 21 nt, Artificial Sequence
  Chemically synthesized
cccagauuuuuucuucccacg

SEQ ID NO: 83073 - RNA, 21 nt, Artificial Sequence
  Chemically synthesized
aauacugguagcaagaugacu

SEQ ID NO: 83074 - RNA, 21 nt, Artificial Sequence
  Chemically synthesized
aucucugccuucuucagguuu

SEQ ID NO: 83075 - RNA, 21 nt, Artificial Sequence
  Chemically synthesized
uaucagggcugucgauggaaa

SEQ ID NO: 83076 - RNA, 21 nt, Artificial Sequence
  Chemically synthesized
cugaacacuccauguacccaa

SEQ ID NO: 83077 - RNA, 21 nt, Artificial Sequence
  Chemically synthesized
accaacaaucaccaguuucuu

SEQ ID NO: 83078 - RNA, 21 nt, Artificial Sequence
  Chemically synthesized
agccuaauucacaaaaguuac

SEQ ID NO: 83079 - RNA, 21 nt, Artificial Sequence
  Chemically synthesized
cauaucucugccuucuucagg

SEQ ID NO: 83080 - RNA, 21 nt, Artificial Sequence
  Chemically synthesized
agccaacucuaccugcuuucc

SEQ ID NO: 83081 - RNA, 21 nt, Artificial Sequence
  Chemically synthesized
aaggccaguaaucauacacua

SEQ ID NO: 83082 - RNA, 21 nt, Artificial Sequence
  Chemically synthesized
aauacacuuucuuugaggaug

SEQ ID NO: 83083 - RNA, 21 nt, Artificial Sequence
  Chemically synthesized
guuauaaaguaguuacagccu

SEQ ID NO: 83084 - RNA, 21 nt, Artificial Sequence
  Chemically synthesized
cuccaucuuuggucuuugcug

SEQ ID NO: 83085 - RNA, 21 nt, Artificial Sequence
  Chemically synthesized
cauugcucaggcaacgaaucc

SEQ ID NO: 83086 - RNA, 21 nt, Artificial Sequence
  Chemically synthesized
ucuuuccacaggcuccaucac

SEQ ID NO: 83087 - RNA, 21 nt, Artificial Sequence
  Chemically synthesized
uaaacuaucagggcugucgau

SEQ ID NO: 83088 - RNA, 21 nt, Artificial Sequence
  Chemically synthesized
uaauaggcaggacauguuagu

SEQ ID NO: 83089 - RNA, 21 nt, Artificial Sequence
  Chemically synthesized
ugugugcucaucauuccgaag

SEQ ID NO: 83090 - RNA, 21 nt, Artificial Sequence
  Chemically synthesized
cucucucacuccaucuuuggu

SEQ ID NO: 83091 - RNA, 21 nt, Artificial Sequence
  Chemically synthesized
cuucuaaauacugguagcaag

SEQ ID NO: 83092 - RNA, 21 nt, Artificial Sequence
  Chemically synthesized
gauaaaugaaaaaggccagua

SEQ ID NO: 83093 - RNA, 21 nt, Artificial Sequence
  Chemically synthesized
auauggccaucuuuuaucaga

SEQ ID NO: 83094 - RNA, 21 nt, Artificial Sequence
  Chemically synthesized
ccaacaaucaccaguuucuuc

SEQ ID NO: 83095 - RNA, 21 nt, Artificial Sequence
  Chemically synthesized
cuuugaggaugacaguauuag

SEQ ID NO: 83096 - RNA, 21 nt, Artificial Sequence
  Chemically synthesized
agguuaugccaucuuccaaag

SEQ ID NO: 83097 - RNA, 21 nt, Artificial Sequence
  Chemically synthesized
acuguaacucugccacagcug

SEQ ID NO: 83098 - RNA, 21 nt, Artificial Sequence
  Chemically synthesized
aagaccagaccguggacuaac

SEQ ID NO: 83099 - RNA, 21 nt, Artificial Sequence
  Chemically synthesized
cauaaucuuccugcccagcug

SEQ ID NO: 83100 - RNA, 21 nt, Artificial Sequence
  Chemically synthesized
augaaaaaggccaguaaucau

SEQ ID NO: 83101 - RNA, 21 nt, Artificial Sequence
  Chemically synthesized
uggagagaagagagacugagu

SEQ ID NO: 83102 - RNA, 21 nt, Artificial Sequence
  Chemically synthesized
ucuaauugccucaggcgugaa

SEQ ID NO: 83103 - RNA, 21 nt, Artificial Sequence
  Chemically synthesized
ugagugccacccaugagaacu

SEQ ID NO: 83104 - RNA, 21 nt, Artificial Sequence
  Chemically synthesized
uugccucaggcgugaaaccaa

SEQ ID NO: 83105 - RNA, 21 nt, Artificial Sequence
  Chemically synthesized
uuucaccggcuccugcuucau

SEQ ID NO: 83106 - RNA, 21 nt, Artificial Sequence
  Chemically synthesized
ugccaucuuccaaagugucua

SEQ ID NO: 83107 - RNA, 21 nt, Artificial Sequence
  Chemically synthesized
cauaguuggcuucuaaauacu

SEQ ID NO: 83108 - RNA, 21 nt, Artificial Sequence
  Chemically synthesized
accaacuguuucucuuucuag

SEQ ID NO: 83109 - RNA, 21 nt, Artificial Sequence
  Chemically synthesized
aacaugaaaccacagaacugu

SEQ ID NO: 83110 - RNA, 21 nt, Artificial Sequence
  Chemically synthesized
gcaugaacuugggcuuuucug

SEQ ID NO: 83111 - RNA, 21 nt, Artificial Sequence
  Chemically synthesized
uacagccuaauucacaaaagu

SEQ ID NO: 83112 - RNA, 21 nt, Artificial Sequence
  Chemically synthesized
gauguuuucuaaacuaucagg

SEQ ID NO: 83113 - RNA, 21 nt, Artificial Sequence
  Chemically synthesized
acauaguucucaaacacugug

SEQ ID NO: 83114 - RNA, 21 nt, Artificial Sequence
  Chemically synthesized
cuaccugcuuuccauccaccu

SEQ ID NO: 83115 - RNA, 21 nt, Artificial Sequence
  Chemically synthesized
cagauaauaggcaggacaugu

SEQ ID NO: 83116 - RNA, 21 nt, Artificial Sequence
  Chemically synthesized
ugugcuugcagcaagguuuca

SEQ ID NO: 83117 - RNA, 21 nt, Artificial Sequence
  Chemically synthesized
uccaucugacuuuauuuccaa

SEQ ID NO: 83118 - RNA, 21 nt, Artificial Sequence
  Chemically synthesized
cuuucuuugaggaugacagua

SEQ ID NO: 83119 - RNA, 21 nt, Artificial Sequence
  Chemically synthesized
guuaugccaucuuccaaagug

SEQ ID NO: 83120 - RNA, 21 nt, Artificial Sequence
  Chemically synthesized
cagauuuuuucuucccacguc

SEQ ID NO: 83121 - RNA, 21 nt, Artificial Sequence
  Chemically synthesized
aaaggccaguaaucauacacu

SEQ ID NO: 83122 - RNA, 21 nt, Artificial Sequence
  Chemically synthesized
cugaaguggugacucaccaga

SEQ ID NO: 83123 - RNA, 21 nt, Artificial Sequence
  Chemically synthesized
ccuaauucacaaaaguuacca

SEQ ID NO: 83124 - RNA, 21 nt, Artificial Sequence
  Chemically synthesized
agcagcucucguagccauuuc

SEQ ID NO: 83125 - RNA, 21 nt, Artificial Sequence
  Chemically synthesized
ugccucaggcgugaaaccaau

SEQ ID NO: 83126 - RNA, 21 nt, Artificial Sequence
  Chemically synthesized
cuaugagcaagcaugucuuuc

SEQ ID NO: 83127 - RNA, 21 nt, Artificial Sequence
  Chemically synthesized
gguuggacaucguuaauaauc

SEQ ID NO: 83128 - RNA, 21 nt, Artificial Sequence
  Chemically synthesized
cucgauaucugccacauaguu

SEQ ID NO: 83129 - RNA, 21 nt, Artificial Sequence
  Chemically synthesized
ugacaguauuaggaaauccaa

SEQ ID NO: 83130 - RNA, 21 nt, Artificial Sequence
  Chemically synthesized
aagccaacucuaccugcuuuc

SEQ ID NO: 83131 - RNA, 21 nt, Artificial Sequence
  Chemically synthesized
caauccuguuugccauaucuc

SEQ ID NO: 83132 - RNA, 21 nt, Artificial Sequence
  Chemically synthesized
cucuaccugcuuuccauccac

SEQ ID NO: 83133 - RNA, 21 nt, Artificial Sequence
  Chemically synthesized
guuacagccuaauucacaaaa

SEQ ID NO: 83134 - RNA, 21 nt, Artificial Sequence
  Chemically synthesized
uaucucugccuucuucagguu

SEQ ID NO: 83135 - RNA, 21 nt, Artificial Sequence
  Chemically synthesized
ugcuugcagcaagguuucaca

SEQ ID NO: 83136 - RNA, 21 nt, Artificial Sequence
  Chemically synthesized
cugcaugaacuugggcuuuuc

SEQ ID NO: 83137 - RNA, 21 nt, Artificial Sequence
  Chemically synthesized
guaguuggaaaaauuaacugg

SEQ ID NO: 83138 - RNA, 21 nt, Artificial Sequence
  Chemically synthesized
cuuuucugguugagcccauuu

SEQ ID NO: 83139 - RNA, 21 nt, Artificial Sequence
  Chemically synthesized
aauuagcgccuggugugucag

SEQ ID NO: 83140 - RNA, 21 nt, Artificial Sequence
  Chemically synthesized
cagagcuaugccaacaaaauc

SEQ ID NO: 83141 - RNA, 21 nt, Artificial Sequence
  Chemically synthesized
gcuuaaguccaggugagacag

SEQ ID NO: 83142 - RNA, 21 nt, Artificial Sequence
  Chemically synthesized
gaugacuucugauuuguaauc

SEQ ID NO: 83143 - RNA, 21 nt, Artificial Sequence
  Chemically synthesized
agaagagagacugagugccac

SEQ ID NO: 83144 - RNA, 21 nt, Artificial Sequence
  Chemically synthesized
aaguuaccaacuguuucucuu

SEQ ID NO: 83145 - RNA, 21 nt, Artificial Sequence
  Chemically synthesized
accagaguaccuugcagcuga

SEQ ID NO: 83146 - RNA, 21 nt, Artificial Sequence
  Chemically synthesized
cuucaaaauuaaccgcauaag

SEQ ID NO: 83147 - RNA, 21 nt, Artificial Sequence
  Chemically synthesized
ucucuuucuagaaagaagcaa

SEQ ID NO: 83148 - RNA, 21 nt, Artificial Sequence
  Chemically synthesized
ugaacuugggcuuuucugguu

SEQ ID NO: 83149 - RNA, 21 nt, Artificial Sequence
  Chemically synthesized
aaaguuuagucagcuggagag

SEQ ID NO: 83150 - RNA, 21 nt, Artificial Sequence
  Chemically synthesized
guuggacaucguuaauaauca

SEQ ID NO: 83151 - RNA, 21 nt, Artificial Sequence
  Chemically synthesized
guuuucuaaacuaucagggcu

SEQ ID NO: 83152 - RNA, 21 nt, Artificial Sequence
  Chemically synthesized
cuugaauuagcgccuggugug

SEQ ID NO: 83153 - RNA, 21 nt, Artificial Sequence
  Chemically synthesized
uggcuucuaaauacugguagc

SEQ ID NO: 83154 - RNA, 21 nt, Artificial Sequence
  Chemically synthesized
cagggcugucgauggaaaaac

SEQ ID NO: 83155 - RNA, 21 nt, Artificial Sequence
  Chemically synthesized
uagucagcuggagagaagaga

SEQ ID NO: 83156 - RNA, 21 nt, Artificial Sequence
  Chemically synthesized
guuggcuucuaaauacuggua

SEQ ID NO: 83157 - RNA, 21 nt, Artificial Sequence
  Chemically synthesized
acacuccauguacccaaaagc

SEQ ID NO: 83158 - RNA, 21 nt, Artificial Sequence
  Chemically synthesized
ccacagaacuguaacucugcc

SEQ ID NO: 83159 - RNA, 21 nt, Artificial Sequence
  Chemically synthesized
aaaaggccaguaaucauacac

SEQ ID NO: 83160 - RNA, 21 nt, Artificial Sequence
  Chemically synthesized
gccauaucucugccuucuuca

SEQ ID NO: 83161 - RNA, 21 nt, Artificial Sequence
  Chemically synthesized
cgccuugugugcucaucauuc

SEQ ID NO: 83162 - RNA, 21 nt, Artificial Sequence
  Chemically synthesized
acugugaauuagagccagaug

SEQ ID NO: 83163 - RNA, 21 nt, Artificial Sequence
  Chemically synthesized
cucacuccaucuuuggucuuu

SEQ ID NO: 83164 - RNA, 21 nt, Artificial Sequence
  Chemically synthesized
guuggaaaaauuaacugguac

SEQ ID NO: 83165 - RNA, 21 nt, Artificial Sequence
  Chemically synthesized
acagaacuguaacucugccac

SEQ ID NO: 83166 - RNA, 21 nt, Artificial Sequence
  Chemically synthesized
aaguccaggugagacagguua

SEQ ID NO: 83167 - RNA, 21 nt, Artificial Sequence
  Chemically synthesized
caaaaguuaccaacuguuucu

SEQ ID NO: 83168 - RNA, 21 nt, Artificial Sequence
  Chemically synthesized
caggcuccaucaccaacaauc

SEQ ID NO: 83169 - RNA, 21 nt, Artificial Sequence
  Chemically synthesized
agaguaccuugcagcugacag

SEQ ID NO: 83170 - RNA, 21 nt, Artificial Sequence
  Chemically synthesized
aaaccacagaacuguaacucu

SEQ ID NO: 83171 - RNA, 23 nt, Artificial Sequence
  Chemically synthesized
agaugaagcaggagccggugaaa

SEQ ID NO: 83172 - RNA, 23 nt, Artificial Sequence
  Chemically synthesized
gacuaaacuuuuuuucuguacca

SEQ ID NO: 83173 - RNA, 23 nt, Artificial Sequence
  Chemically synthesized
ucuuaacuucuugcuucuuucua

SEQ ID NO: 83174 - RNA, 23 nt, Artificial Sequence
  Chemically synthesized
caacuacuaauagaauaaaggca

SEQ ID NO: 83175 - RNA, 23 nt, Artificial Sequence
  Chemically synthesized
caauggcugccauccggaagaaa

SEQ ID NO: 83176 - RNA, 23 nt, Artificial Sequence
  Chemically synthesized
aagaugaagcaggagccggugaa

SEQ ID NO: 83177 - RNA, 23 nt, Artificial Sequence
  Chemically synthesized
gcuaaguaaauaggaauugguuu

SEQ ID NO: 83178 - RNA, 23 nt, Artificial Sequence
  Chemically synthesized
aauugguuucacgccugaggcaa

SEQ ID NO: 83179 - RNA, 23 nt, Artificial Sequence
  Chemically synthesized
caguuuuuugaaaaugggcucaa

SEQ ID NO: 83180 - RNA, 23 nt, Artificial Sequence
  Chemically synthesized
uguuuuuccaucgacagcccuga

SEQ ID NO: 83181 - RNA, 23 nt, Artificial Sequence
  Chemically synthesized
ccaacuacuaauagaauaaaggc

SEQ ID NO: 83182 - RNA, 23 nt, Artificial Sequence
  Chemically synthesized
cauuucugucccaacgugcccau

SEQ ID NO: 83183 - RNA, 23 nt, Artificial Sequence
  Chemically synthesized
guuuuuccaucgacagcccugau

SEQ ID NO: 83184 - RNA, 23 nt, Artificial Sequence
  Chemically synthesized
guucaugcagcuguggcagaguu

SEQ ID NO: 83185 - RNA, 23 nt, Artificial Sequence
  Chemically synthesized
uuuuuugaaaaugggcucaacca

SEQ ID NO: 83186 - RNA, 23 nt, Artificial Sequence
  Chemically synthesized
guuaguccacggucuggucuuca

SEQ ID NO: 83187 - RNA, 23 nt, Artificial Sequence
  Chemically synthesized
guguuuuuccaucgacagcccug

SEQ ID NO: 83188 - RNA, 23 nt, Artificial Sequence
  Chemically synthesized
uucugucccaacgugcccaucau

SEQ ID NO: 83189 - RNA, 23 nt, Artificial Sequence
  Chemically synthesized
gaauuucuuaacuucuugcuucu

SEQ ID NO: 83190 - RNA, 23 nt, Artificial Sequence
  Chemically synthesized
aaugaugagcacacaaggcggga

SEQ ID NO: 83191 - RNA, 23 nt, Artificial Sequence
  Chemically synthesized
aguguauuuggaaauaaagucag

SEQ ID NO: 83192 - RNA, 23 nt, Artificial Sequence
  Chemically synthesized
cugacuaaacuuuuuuucuguac

SEQ ID NO: 83193 - RNA, 23 nt, Artificial Sequence
  Chemically synthesized
cuaaguaaauaggaauugguuuc

SEQ ID NO: 83194 - RNA, 23 nt, Artificial Sequence
  Chemically synthesized
aguuggcuuugugggacacagcu

SEQ ID NO: 83195 - RNA, 23 nt, Artificial Sequence
  Chemically synthesized
ucguuaguccacggucuggucuu

SEQ ID NO: 83196 - RNA, 23 nt, Artificial Sequence
  Chemically synthesized
gugagucaccacuucagggcuuu

SEQ ID NO: 83197 - RNA, 23 nt, Artificial Sequence
  Chemically synthesized
cuaauucacagugcucuuuucuc

SEQ ID NO: 83198 - RNA, 23 nt, Artificial Sequence
  Chemically synthesized
cuaaacuuuuuuucuguaccagu

SEQ ID NO: 83199 - RNA, 23 nt, Artificial Sequence
  Chemically synthesized
gucacuuuuucugauaaaagaug

SEQ ID NO: 83200 - RNA, 23 nt, Artificial Sequence
  Chemically synthesized
caacuaugauuauuaacgauguc

SEQ ID NO: 83201 - RNA, 23 nt, Artificial Sequence
  Chemically synthesized
gauuuuguuggcauagcucuggg

SEQ ID NO: 83202 - RNA, 23 nt, Artificial Sequence
  Chemically synthesized
aauggcugccauccggaagaaac

SEQ ID NO: 83203 - RNA, 23 nt, Artificial Sequence
  Chemically synthesized
guaaauaggaauugguuucacgc

SEQ ID NO: 83204 - RNA, 23 nt, Artificial Sequence
  Chemically synthesized
auuauuaacgauguccaacccgu

SEQ ID NO: 83205 - RNA, 23 nt, Artificial Sequence
  Chemically synthesized
uauuaacgauguccaacccgucu

SEQ ID NO: 83206 - RNA, 23 nt, Artificial Sequence
  Chemically synthesized
accacuucagggcuuuacuccgu

SEQ ID NO: 83207 - RNA, 23 nt, Artificial Sequence
  Chemically synthesized
aaauggcuacgagagcugcucug

SEQ ID NO: 83208 - RNA, 23 nt, Artificial Sequence
  Chemically synthesized
aagaggcuggacucggauucguu

SEQ ID NO: 83209 - RNA, 23 nt, Artificial Sequence
  Chemically synthesized
gugauuguuggugauggagccug

SEQ ID NO: 83210 - RNA, 23 nt, Artificial Sequence
  Chemically synthesized
uucuuaacuucuugcuucuuucu

SEQ ID NO: 83211 - RNA, 23 nt, Artificial Sequence
  Chemically synthesized
ugacuaaacuuuuuuucuguacc

SEQ ID NO: 83212 - RNA, 23 nt, Artificial Sequence
  Chemically synthesized
auucguugccugagcaauggcug

SEQ ID NO: 83213 - RNA, 23 nt, Artificial Sequence
  Chemically synthesized
acuaaacuuuuuuucuguaccag

SEQ ID NO: 83214 - RNA, 23 nt, Artificial Sequence
  Chemically synthesized
uuaguccacggucuggucuucag

SEQ ID NO: 83215 - RNA, 23 nt, Artificial Sequence
  Chemically synthesized
uuuuugaaaaugggcucaaccag

SEQ ID NO: 83216 - RNA, 23 nt, Artificial Sequence
  Chemically synthesized
uuucugucccaacgugcccauca

SEQ ID NO: 83217 - RNA, 23 nt, Artificial Sequence
  Chemically synthesized
aacuacuaauagaauaaaggcag

SEQ ID NO: 83218 - RNA, 23 nt, Artificial Sequence
  Chemically synthesized
ucuaauucacagugcucuuuucu

SEQ ID NO: 83219 - RNA, 23 nt, Artificial Sequence
  Chemically synthesized
guuuuuugaaaaugggcucaacc

SEQ ID NO: 83220 - RNA, 23 nt, Artificial Sequence
  Chemically synthesized
ucuccucacuguauccagguucc

SEQ ID NO: 83221 - RNA, 23 nt, Artificial Sequence
  Chemically synthesized
aguaaauaggaauugguuucacg

SEQ ID NO: 83222 - RNA, 23 nt, Artificial Sequence
  Chemically synthesized
uuuucuccucacuguauccaggu

SEQ ID NO: 83223 - RNA, 23 nt, Artificial Sequence
  Chemically synthesized
aguuuuuugaaaaugggcucaac

SEQ ID NO: 83224 - RNA, 23 nt, Artificial Sequence
  Chemically synthesized
ucacuuuuucugauaaaagaugg

SEQ ID NO: 83225 - RNA, 23 nt, Artificial Sequence
  Chemically synthesized
uuucuuaacuucuugcuucuuuc

SEQ ID NO: 83226 - RNA, 23 nt, Artificial Sequence
  Chemically synthesized
cacuuuuucugauaaaagauggc

SEQ ID NO: 83227 - RNA, 23 nt, Artificial Sequence
  Chemically synthesized
uuucuccucacuguauccagguu

SEQ ID NO: 83228 - RNA, 23 nt, Artificial Sequence
  Chemically synthesized
auguuauacugauguguuuuucc

SEQ ID NO: 83229 - RNA, 23 nt, Artificial Sequence
  Chemically synthesized
aaguaaauaggaauugguuucac

SEQ ID NO: 83230 - RNA, 23 nt, Artificial Sequence
  Chemically synthesized
uaaauaggaauugguuucacgcc

SEQ ID NO: 83231 - RNA, 23 nt, Artificial Sequence
  Chemically synthesized
aacuaugauuauuaacgaugucc

SEQ ID NO: 83232 - RNA, 23 nt, Artificial Sequence
  Chemically synthesized
cuuuucuccucacuguauccagg

SEQ ID NO: 83233 - RNA, 23 nt, Artificial Sequence
  Chemically synthesized
uuaacgauguccaacccgucugg

SEQ ID NO: 83234 - RNA, 23 nt, Artificial Sequence
  Chemically synthesized
uaauucacagugcucuuuucucc

SEQ ID NO: 83235 - RNA, 23 nt, Artificial Sequence
  Chemically synthesized
uuauuaacgauguccaacccguc

SEQ ID NO: 83236 - RNA, 23 nt, Artificial Sequence
  Chemically synthesized
aaacaucccagaaaaguggaccc

SEQ ID NO: 83237 - RNA, 23 nt, Artificial Sequence
  Chemically synthesized
auuaacgauguccaacccgucug

SEQ ID NO: 83238 - RNA, 23 nt, Artificial Sequence
  Chemically synthesized
uuucaccggcuccugcuucaucu

SEQ ID NO: 83239 - RNA, 23 nt, Artificial Sequence
  Chemically synthesized
ugguacagaaaaaaaguuuaguc

SEQ ID NO: 83240 - RNA, 23 nt, Artificial Sequence
  Chemically synthesized
uagaaagaagcaagaaguuaaga

SEQ ID NO: 83241 - RNA, 23 nt, Artificial Sequence
  Chemically synthesized
ugccuuuauucuauuaguaguug

SEQ ID NO: 83242 - RNA, 23 nt, Artificial Sequence
  Chemically synthesized
uuucuuccggauggcagccauug

SEQ ID NO: 83243 - RNA, 23 nt, Artificial Sequence
  Chemically synthesized
uucaccggcuccugcuucaucuu

SEQ ID NO: 83244 - RNA, 23 nt, Artificial Sequence
  Chemically synthesized
aaaccaauuccuauuuacuuagc

SEQ ID NO: 83245 - RNA, 23 nt, Artificial Sequence
  Chemically synthesized
uugccucaggcgugaaaccaauu

SEQ ID NO: 83246 - RNA, 23 nt, Artificial Sequence
  Chemically synthesized
uugagcccauuuucaaaaaacug

SEQ ID NO: 83247 - RNA, 23 nt, Artificial Sequence
  Chemically synthesized
ucagggcugucgauggaaaaaca

SEQ ID NO: 83248 - RNA, 23 nt, Artificial Sequence
  Chemically synthesized
gccuuuauucuauuaguaguugg

SEQ ID NO: 83249 - RNA, 23 nt, Artificial Sequence
  Chemically synthesized
augggcacguugggacagaaaug

SEQ ID NO: 83250 - RNA, 23 nt, Artificial Sequence
  Chemically synthesized
aucagggcugucgauggaaaaac

SEQ ID NO: 83251 - RNA, 23 nt, Artificial Sequence
  Chemically synthesized
aacucugccacagcugcaugaac

SEQ ID NO: 83252 - RNA, 23 nt, Artificial Sequence
  Chemically synthesized
ugguugagcccauuuucaaaaaa

SEQ ID NO: 83253 - RNA, 23 nt, Artificial Sequence
  Chemically synthesized
ugaagaccagaccguggacuaac

SEQ ID NO: 83254 - RNA, 23 nt, Artificial Sequence
  Chemically synthesized
cagggcugucgauggaaaaacac

SEQ ID NO: 83255 - RNA, 23 nt, Artificial Sequence
  Chemically synthesized
augaugggcacguugggacagaa

SEQ ID NO: 83256 - RNA, 23 nt, Artificial Sequence
  Chemically synthesized
agaagcaagaaguuaagaaauuc

SEQ ID NO: 83257 - RNA, 23 nt, Artificial Sequence
  Chemically synthesized
ucccgccuugugugcucaucauu

SEQ ID NO: 83258 - RNA, 23 nt, Artificial Sequence
  Chemically synthesized
cugacuuuauuuccaaauacacu

SEQ ID NO: 83259 - RNA, 23 nt, Artificial Sequence
  Chemically synthesized
guacagaaaaaaaguuuagucag

SEQ ID NO: 83260 - RNA, 23 nt, Artificial Sequence
  Chemically synthesized
gaaaccaauuccuauuuacuuag

SEQ ID NO: 83261 - RNA, 23 nt, Artificial Sequence
  Chemically synthesized
agcugugucccacaaagccaacu

SEQ ID NO: 83262 - RNA, 23 nt, Artificial Sequence
  Chemically synthesized
aagaccagaccguggacuaacga

SEQ ID NO: 83263 - RNA, 23 nt, Artificial Sequence
  Chemically synthesized
aaagcccugaaguggugacucac

SEQ ID NO: 83264 - RNA, 23 nt, Artificial Sequence
  Chemically synthesized
gagaaaagagcacugugaauuag

SEQ ID NO: 83265 - RNA, 23 nt, Artificial Sequence
  Chemically synthesized
acugguacagaaaaaaaguuuag

SEQ ID NO: 83266 - RNA, 23 nt, Artificial Sequence
  Chemically synthesized
caucuuuuaucagaaaaagugac

SEQ ID NO: 83267 - RNA, 23 nt, Artificial Sequence
  Chemically synthesized
gacaucguuaauaaucauaguug

SEQ ID NO: 83268 - RNA, 23 nt, Artificial Sequence
  Chemically synthesized
cccagagcuaugccaacaaaauc

SEQ ID NO: 83269 - RNA, 23 nt, Artificial Sequence
  Chemically synthesized
guuucuuccggauggcagccauu

SEQ ID NO: 83270 - RNA, 23 nt, Artificial Sequence
  Chemically synthesized
gcgugaaaccaauuccuauuuac

SEQ ID NO: 83271 - RNA, 23 nt, Artificial Sequence
  Chemically synthesized
acggguuggacaucguuaauaau

SEQ ID NO: 83272 - RNA, 23 nt, Artificial Sequence
  Chemically synthesized
agacggguuggacaucguuaaua

SEQ ID NO: 83273 - RNA, 23 nt, Artificial Sequence
  Chemically synthesized
acggaguaaagcccugaaguggu

SEQ ID NO: 83274 - RNA, 23 nt, Artificial Sequence
  Chemically synthesized
cagagcagcucucguagccauuu

SEQ ID NO: 83275 - RNA, 23 nt, Artificial Sequence
  Chemically synthesized
aacgaauccgaguccagccucuu

SEQ ID NO: 83276 - RNA, 23 nt, Artificial Sequence
  Chemically synthesized
caggcuccaucaccaacaaucac

SEQ ID NO: 83277 - RNA, 23 nt, Artificial Sequence
  Chemically synthesized
agaaagaagcaagaaguuaagaa

SEQ ID NO: 83278 - RNA, 23 nt, Artificial Sequence
  Chemically synthesized
gguacagaaaaaaaguuuaguca

SEQ ID NO: 83279 - RNA, 23 nt, Artificial Sequence
  Chemically synthesized
cagccauugcucaggcaacgaau

SEQ ID NO: 83280 - RNA, 23 nt, Artificial Sequence
  Chemically synthesized
cugguacagaaaaaaaguuuagu

SEQ ID NO: 83281 - RNA, 23 nt, Artificial Sequence
  Chemically synthesized
cugaagaccagaccguggacuaa

SEQ ID NO: 83282 - RNA, 23 nt, Artificial Sequence
  Chemically synthesized
cugguugagcccauuuucaaaaa

SEQ ID NO: 83283 - RNA, 23 nt, Artificial Sequence
  Chemically synthesized
ugaugggcacguugggacagaaa

SEQ ID NO: 83284 - RNA, 23 nt, Artificial Sequence
  Chemically synthesized
cugccuuuauucuauuaguaguu

SEQ ID NO: 83285 - RNA, 23 nt, Artificial Sequence
  Chemically synthesized
agaaaagagcacugugaauuaga

SEQ ID NO: 83286 - RNA, 23 nt, Artificial Sequence
  Chemically synthesized
gguugagcccauuuucaaaaaac

SEQ ID NO: 83287 - RNA, 23 nt, Artificial Sequence
  Chemically synthesized
ggaaccuggauacagugaggaga

SEQ ID NO: 83288 - RNA, 23 nt, Artificial Sequence
  Chemically synthesized
cgugaaaccaauuccuauuuacu

SEQ ID NO: 83289 - RNA, 23 nt, Artificial Sequence
  Chemically synthesized
accuggauacagugaggagaaaa

SEQ ID NO: 83290 - RNA, 23 nt, Artificial Sequence
  Chemically synthesized
guugagcccauuuucaaaaaacu

SEQ ID NO: 83291 - RNA, 23 nt, Artificial Sequence
  Chemically synthesized
ccaucuuuuaucagaaaaaguga

SEQ ID NO: 83292 - RNA, 23 nt, Artificial Sequence
  Chemically synthesized
gaaagaagcaagaaguuaagaaa

SEQ ID NO: 83293 - RNA, 23 nt, Artificial Sequence
  Chemically synthesized
gccaucuuuuaucagaaaaagug

SEQ ID NO: 83294 - RNA, 23 nt, Artificial Sequence
  Chemically synthesized
aaccuggauacagugaggagaaa

SEQ ID NO: 83295 - RNA, 23 nt, Artificial Sequence
  Chemically synthesized
ggaaaaacacaucaguauaacau

SEQ ID NO: 83296 - RNA, 23 nt, Artificial Sequence
  Chemically synthesized
gugaaaccaauuccuauuuacuu

SEQ ID NO: 83297 - RNA, 23 nt, Artificial Sequence
  Chemically synthesized
ggcgugaaaccaauuccuauuua

SEQ ID NO: 83298 - RNA, 23 nt, Artificial Sequence
  Chemically synthesized
ggacaucguuaauaaucauaguu

SEQ ID NO: 83299 - RNA, 23 nt, Artificial Sequence
  Chemically synthesized
ccuggauacagugaggagaaaag

SEQ ID NO: 83300 - RNA, 23 nt, Artificial Sequence
  Chemically synthesized
ccagacggguuggacaucguuaa

SEQ ID NO: 83301 - RNA, 23 nt, Artificial Sequence
  Chemically synthesized
ggagaaaagagcacugugaauua

SEQ ID NO: 83302 - RNA, 23 nt, Artificial Sequence
  Chemically synthesized
gacggguuggacaucguuaauaa

SEQ ID NO: 83303 - RNA, 23 nt, Artificial Sequence
  Chemically synthesized
ggguccacuuuucugggauguuu

SEQ ID NO: 83304 - RNA, 23 nt, Artificial Sequence
  Chemically synthesized
cagacggguuggacaucguuaau

SEQ ID NO: 83305 - RNA, 23 nt, Artificial Sequence
  Chemically synthesized
uuaggcuguaacuacuuuauaac

SEQ ID NO: 83306 - RNA, 23 nt, Artificial Sequence
  Chemically synthesized
gaccaaagauggagugagagagg

SEQ ID NO: 83307 - RNA, 23 nt, Artificial Sequence
  Chemically synthesized
cccagauaccgauguuauacuga

SEQ ID NO: 83308 - RNA, 23 nt, Artificial Sequence
  Chemically synthesized
acccagauaccgauguuauacug

SEQ ID NO: 83309 - RNA, 23 nt, Artificial Sequence
  Chemically synthesized
uacccagauaccgauguuauacu

SEQ ID NO: 83310 - RNA, 23 nt, Artificial Sequence
  Chemically synthesized
cuacccagauaccgauguuauac

SEQ ID NO: 83311 - RNA, 23 nt, Artificial Sequence
  Chemically synthesized
ccuacccagauaccgauguuaua

SEQ ID NO: 83312 - RNA, 23 nt, Artificial Sequence
  Chemically synthesized
accaaagauggagugagagaggu

SEQ ID NO: 83313 - RNA, 23 nt, Artificial Sequence
  Chemically synthesized
gauuauuaacgauguccaacccg

SEQ ID NO: 83314 - RNA, 23 nt, Artificial Sequence
  Chemically synthesized
cgacagcccugauaguuuagaaa

SEQ ID NO: 83315 - RNA, 23 nt, Artificial Sequence
  Chemically synthesized
ggagcugggcuaaguaaauagga

SEQ ID NO: 83316 - RNA, 23 nt, Artificial Sequence
  Chemically synthesized
uggagcugggcuaaguaaauagg

SEQ ID NO: 83317 - RNA, 23 nt, Artificial Sequence
  Chemically synthesized
auggagcugggcuaaguaaauag

SEQ ID NO: 83318 - RNA, 23 nt, Artificial Sequence
  Chemically synthesized
cauggagcugggcuaaguaaaua

SEQ ID NO: 83319 - RNA, 23 nt, Artificial Sequence
  Chemically synthesized
ccauggagcugggcuaaguaaau

SEQ ID NO: 83320 - RNA, 23 nt, Artificial Sequence
  Chemically synthesized
gauggagugagagagguuuuuga

SEQ ID NO: 83321 - RNA, 23 nt, Artificial Sequence
  Chemically synthesized
gaauaaaggcaguuuucuaaaaa

SEQ ID NO: 83322 - RNA, 23 nt, Artificial Sequence
  Chemically synthesized
agaauaaaggcaguuuucuaaaa

SEQ ID NO: 83323 - RNA, 23 nt, Artificial Sequence
  Chemically synthesized
uagaauaaaggcaguuuucuaaa

SEQ ID NO: 83324 - RNA, 23 nt, Artificial Sequence
  Chemically synthesized
gagcugggcuaaguaaauaggaa

SEQ ID NO: 83325 - RNA, 23 nt, Artificial Sequence
  Chemically synthesized
cccauggagcugggcuaaguaaa

SEQ ID NO: 83326 - RNA, 23 nt, Artificial Sequence
  Chemically synthesized
ccccauggagcugggcuaaguaa

SEQ ID NO: 83327 - RNA, 23 nt, Artificial Sequence
  Chemically synthesized
accccauggagcugggcuaagua

SEQ ID NO: 83328 - RNA, 23 nt, Artificial Sequence
  Chemically synthesized
ggaaagacaugcuugcucauagu

SEQ ID NO: 83329 - RNA, 23 nt, Artificial Sequence
  Chemically synthesized
uggaaagacaugcuugcucauag

SEQ ID NO: 83330 - RNA, 23 nt, Artificial Sequence
  Chemically synthesized
guggaaagacaugcuugcucaua

SEQ ID NO: 83331 - RNA, 23 nt, Artificial Sequence
  Chemically synthesized
uguggaaagacaugcuugcucau

SEQ ID NO: 83332 - RNA, 23 nt, Artificial Sequence
  Chemically synthesized
cuguggaaagacaugcuugcuca

SEQ ID NO: 83333 - RNA, 23 nt, Artificial Sequence
  Chemically synthesized
gccggugaaaccugaagaaggca

SEQ ID NO: 83334 - RNA, 23 nt, Artificial Sequence
  Chemically synthesized
agccggugaaaccugaagaaggc

SEQ ID NO: 83335 - RNA, 23 nt, Artificial Sequence
  Chemically synthesized
gagccggugaaaccugaagaagg

SEQ ID NO: 83336 - RNA, 23 nt, Artificial Sequence
  Chemically synthesized
ggagccggugaaaccugaagaag

SEQ ID NO: 83337 - RNA, 23 nt, Artificial Sequence
  Chemically synthesized
aggagccggugaaaccugaagaa

SEQ ID NO: 83338 - RNA, 23 nt, Artificial Sequence
  Chemically synthesized
auaucgagguggauggaaagcag

SEQ ID NO: 83339 - RNA, 23 nt, Artificial Sequence
  Chemically synthesized
gauaucgagguggauggaaagca

SEQ ID NO: 83340 - RNA, 23 nt, Artificial Sequence
  Chemically synthesized
agauaucgagguggauggaaagc

SEQ ID NO: 83341 - RNA, 23 nt, Artificial Sequence
  Chemically synthesized
cagauaucgagguggauggaaag

SEQ ID NO: 83342 - RNA, 23 nt, Artificial Sequence
  Chemically synthesized
gcagauaucgagguggauggaaa

SEQ ID NO: 83343 - RNA, 23 nt, Artificial Sequence
  Chemically synthesized
ccacaguguuugagaacuaugug

SEQ ID NO: 83344 - RNA, 23 nt, Artificial Sequence
  Chemically synthesized
cccacaguguuugagaacuaugu

SEQ ID NO: 83345 - RNA, 23 nt, Artificial Sequence
  Chemically synthesized
gcccacaguguuugagaacuaug

SEQ ID NO: 83346 - RNA, 23 nt, Artificial Sequence
  Chemically synthesized
ugcccacaguguuugagaacuau

SEQ ID NO: 83347 - RNA, 23 nt, Artificial Sequence
  Chemically synthesized
gugcccacaguguuugagaacua

SEQ ID NO: 83348 - RNA, 23 nt, Artificial Sequence
  Chemically synthesized
gauggagccuguggaaagacaug

SEQ ID NO: 83349 - RNA, 23 nt, Artificial Sequence
  Chemically synthesized
ugauggagccuguggaaagacau

SEQ ID NO: 83350 - RNA, 23 nt, Artificial Sequence
  Chemically synthesized
gugauggagccuguggaaagaca

SEQ ID NO: 83351 - RNA, 23 nt, Artificial Sequence
  Chemically synthesized
ggugauggagccuguggaaagac

SEQ ID NO: 83352 - RNA, 23 nt, Artificial Sequence
  Chemically synthesized
uggugauggagccuguggaaaga

SEQ ID NO: 83353 - RNA, 23 nt, Artificial Sequence
  Chemically synthesized
gaaaaugggcucaaccagaaaag

SEQ ID NO: 83354 - RNA, 23 nt, Artificial Sequence
  Chemically synthesized
ugaaaaugggcucaaccagaaaa

SEQ ID NO: 83355 - RNA, 23 nt, Artificial Sequence
  Chemically synthesized
uugaaaaugggcucaaccagaaa

SEQ ID NO: 83356 - RNA, 23 nt, Artificial Sequence
  Chemically synthesized
uuugaaaaugggcucaaccagaa

SEQ ID NO: 83357 - RNA, 23 nt, Artificial Sequence
  Chemically synthesized
uuuugaaaaugggcucaaccaga

SEQ ID NO: 83358 - RNA, 23 nt, Artificial Sequence
  Chemically synthesized
accaguauuuagaagccaacuau

SEQ ID NO: 83359 - RNA, 23 nt, Artificial Sequence
  Chemically synthesized
ggagccuguggaaagacaugcuu

SEQ ID NO: 83360 - RNA, 23 nt, Artificial Sequence
  Chemically synthesized
uggagccuguggaaagacaugcu

SEQ ID NO: 83361 - RNA, 23 nt, Artificial Sequence
  Chemically synthesized
auggagccuguggaaagacaugc

SEQ ID NO: 83362 - RNA, 23 nt, Artificial Sequence
  Chemically synthesized
gauaaaagauggccauauuaccc

SEQ ID NO: 83363 - RNA, 23 nt, Artificial Sequence
  Chemically synthesized
agcugggcaggaagauuaugauc

SEQ ID NO: 83364 - RNA, 23 nt, Artificial Sequence
  Chemically synthesized
cagcugggcaggaagauuaugau

SEQ ID NO: 83365 - RNA, 23 nt, Artificial Sequence
  Chemically synthesized
acagcugggcaggaagauuauga

SEQ ID NO: 83366 - RNA, 23 nt, Artificial Sequence
  Chemically synthesized
cacagcugggcaggaagauuaug

SEQ ID NO: 83367 - RNA, 23 nt, Artificial Sequence
  Chemically synthesized
acacagcugggcaggaagauuau

SEQ ID NO: 83368 - RNA, 23 nt, Artificial Sequence
  Chemically synthesized
ggcagauaucgagguggauggaa

SEQ ID NO: 83369 - RNA, 23 nt, Artificial Sequence
  Chemically synthesized
uggcagauaucgagguggaugga

SEQ ID NO: 83370 - RNA, 23 nt, Artificial Sequence
  Chemically synthesized
guggcagauaucgagguggaugg

SEQ ID NO: 83371 - RNA, 23 nt, Artificial Sequence
  Chemically synthesized
uguggcagauaucgagguggaug

SEQ ID NO: 83372 - RNA, 23 nt, Artificial Sequence
  Chemically synthesized
auguggcagauaucgagguggau

SEQ ID NO: 83373 - RNA, 23 nt, Artificial Sequence
  Chemically synthesized
gaaauaaagucagauggaaaauu

SEQ ID NO: 83374 - RNA, 23 nt, Artificial Sequence
  Chemically synthesized
ggaaauaaagucagauggaaaau

SEQ ID NO: 83375 - RNA, 23 nt, Artificial Sequence
  Chemically synthesized
cagcuguggcagaguuacaguuc

SEQ ID NO: 83376 - RNA, 23 nt, Artificial Sequence
  Chemically synthesized
gcagcuguggcagaguuacaguu

SEQ ID NO: 83377 - RNA, 23 nt, Artificial Sequence
  Chemically synthesized
ugcagcuguggcagaguuacagu

SEQ ID NO: 83378 - RNA, 23 nt, Artificial Sequence
  Chemically synthesized
augcagcuguggcagaguuacag

SEQ ID NO: 83379 - RNA, 23 nt, Artificial Sequence
  Chemically synthesized
caugcagcuguggcagaguuaca

SEQ ID NO: 83380 - RNA, 23 nt, Artificial Sequence
  Chemically synthesized
gguggauggaaagcagguagagu

SEQ ID NO: 83381 - RNA, 23 nt, Artificial Sequence
  Chemically synthesized
agguggauggaaagcagguagag

SEQ ID NO: 83382 - RNA, 23 nt, Artificial Sequence
  Chemically synthesized
gagguggauggaaagcagguaga

SEQ ID NO: 83383 - RNA, 23 nt, Artificial Sequence
  Chemically synthesized
cgagguggauggaaagcagguag

SEQ ID NO: 83384 - RNA, 23 nt, Artificial Sequence
  Chemically synthesized
ucgagguggauggaaagcaggua

SEQ ID NO: 83385 - RNA, 23 nt, Artificial Sequence
  Chemically synthesized
agaacuauguggcagauaucgag

SEQ ID NO: 83386 - RNA, 23 nt, Artificial Sequence
  Chemically synthesized
gagaacuauguggcagauaucga

SEQ ID NO: 83387 - RNA, 23 nt, Artificial Sequence
  Chemically synthesized
ugagaacuauguggcagauaucg

SEQ ID NO: 83388 - RNA, 23 nt, Artificial Sequence
  Chemically synthesized
uugagaacuauguggcagauauc

SEQ ID NO: 83389 - RNA, 23 nt, Artificial Sequence
  Chemically synthesized
uuugagaacuauguggcagauau

SEQ ID NO: 83390 - RNA, 23 nt, Artificial Sequence
  Chemically synthesized
aaaugggcucaaccagaaaagcc

SEQ ID NO: 83391 - RNA, 23 nt, Artificial Sequence
  Chemically synthesized
aaaaugggcucaaccagaaaagc

SEQ ID NO: 83392 - RNA, 23 nt, Artificial Sequence
  Chemically synthesized
aagucagauggaaaauucauuuu

SEQ ID NO: 83393 - RNA, 23 nt, Artificial Sequence
  Chemically synthesized
gacacagcugggcaggaagauua

SEQ ID NO: 83394 - RNA, 23 nt, Artificial Sequence
  Chemically synthesized
uuggaagauggcauaaccugucu

SEQ ID NO: 83395 - RNA, 23 nt, Artificial Sequence
  Chemically synthesized
uuuggaagauggcauaaccuguc

SEQ ID NO: 83396 - RNA, 23 nt, Artificial Sequence
  Chemically synthesized
cuuuggaagauggcauaaccugu

SEQ ID NO: 83397 - RNA, 23 nt, Artificial Sequence
  Chemically synthesized
aaaccuugcugcaagcacagccc

SEQ ID NO: 83398 - RNA, 23 nt, Artificial Sequence
  Chemically synthesized
gaaaccuugcugcaagcacagcc

SEQ ID NO: 83399 - RNA, 23 nt, Artificial Sequence
  Chemically synthesized
ugaaaccuugcugcaagcacagc

SEQ ID NO: 83400 - RNA, 23 nt, Artificial Sequence
  Chemically synthesized
gugaaaccuugcugcaagcacag

SEQ ID NO: 83401 - RNA, 23 nt, Artificial Sequence
  Chemically synthesized
ugugaaaccuugcugcaagcaca

SEQ ID NO: 83402 - RNA, 23 nt, Artificial Sequence
  Chemically synthesized
cugcaagcuagacgugggaagaa

SEQ ID NO: 83403 - RNA, 23 nt, Artificial Sequence
  Chemically synthesized
ucugcaagcuagacgugggaaga

SEQ ID NO: 83404 - RNA, 23 nt, Artificial Sequence
  Chemically synthesized
ugugcccacaguguuugagaacu

SEQ ID NO: 83405 - RNA, 23 nt, Artificial Sequence
  Chemically synthesized
augugcccacaguguuugagaac

SEQ ID NO: 83406 - RNA, 23 nt, Artificial Sequence
  Chemically synthesized
uaugugcccacaguguuugagaa

SEQ ID NO: 83407 - RNA, 23 nt, Artificial Sequence
  Chemically synthesized
ugggcaggaagauuaugaucgcc

SEQ ID NO: 83408 - RNA, 23 nt, Artificial Sequence
  Chemically synthesized
cugggcaggaagauuaugaucgc

SEQ ID NO: 83409 - RNA, 23 nt, Artificial Sequence
  Chemically synthesized
gcugggcaggaagauuaugaucg

SEQ ID NO: 83410 - RNA, 23 nt, Artificial Sequence
  Chemically synthesized
accuaagauuacaaaucagaagu

SEQ ID NO: 83411 - RNA, 23 nt, Artificial Sequence
  Chemically synthesized
uaccuaagauuacaaaucagaag

SEQ ID NO: 83412 - RNA, 23 nt, Artificial Sequence
  Chemically synthesized
uuaccuaagauuacaaaucagaa

SEQ ID NO: 83413 - RNA, 23 nt, Artificial Sequence
  Chemically synthesized
uaacuucuugcuucuuucuagaa

SEQ ID NO: 83414 - RNA, 23 nt, Artificial Sequence
  Chemically synthesized
uuaacuucuugcuucuuucuaga

SEQ ID NO: 83415 - RNA, 23 nt, Artificial Sequence
  Chemically synthesized
gaagauuaugaucgccugaggcc

SEQ ID NO: 83416 - RNA, 23 nt, Artificial Sequence
  Chemically synthesized
ggaagauuaugaucgccugaggc

SEQ ID NO: 83417 - RNA, 23 nt, Artificial Sequence
  Chemically synthesized
aggaagauuaugaucgccugagg

SEQ ID NO: 83418 - RNA, 23 nt, Artificial Sequence
  Chemically synthesized
caggaagauuaugaucgccugag

SEQ ID NO: 83419 - RNA, 23 nt, Artificial Sequence
  Chemically synthesized
gcaggaagauuaugaucgccuga

SEQ ID NO: 83420 - RNA, 23 nt, Artificial Sequence
  Chemically synthesized
gaguuggcuuugugggacacagc

SEQ ID NO: 83421 - RNA, 23 nt, Artificial Sequence
  Chemically synthesized
agaguuggcuuugugggacacag

SEQ ID NO: 83422 - RNA, 23 nt, Artificial Sequence
  Chemically synthesized
uagaguuggcuuugugggacaca

SEQ ID NO: 83423 - RNA, 23 nt, Artificial Sequence
  Chemically synthesized
guagaguuggcuuugugggacac

SEQ ID NO: 83424 - RNA, 23 nt, Artificial Sequence
  Chemically synthesized
gguagaguuggcuuugugggaca

SEQ ID NO: 83425 - RNA, 23 nt, Artificial Sequence
  Chemically synthesized
ggcaggaagauuaugaucgccug

SEQ ID NO: 83426 - RNA, 23 nt, Artificial Sequence
  Chemically synthesized
guuugagaacuauguggcagaua

SEQ ID NO: 83427 - RNA, 23 nt, Artificial Sequence
  Chemically synthesized
uguuugagaacuauguggcagau

SEQ ID NO: 83428 - RNA, 23 nt, Artificial Sequence
  Chemically synthesized
guguuugagaacuauguggcaga

SEQ ID NO: 83429 - RNA, 23 nt, Artificial Sequence
  Chemically synthesized
aguguuugagaacuauguggcag

SEQ ID NO: 83430 - RNA, 23 nt, Artificial Sequence
  Chemically synthesized
caguguuugagaacuauguggca

SEQ ID NO: 83431 - RNA, 23 nt, Artificial Sequence
  Chemically synthesized
cagaagucaucuugcuaccagua

SEQ ID NO: 83432 - RNA, 23 nt, Artificial Sequence
  Chemically synthesized
uagaaaacaucccagaaaagugg

SEQ ID NO: 83433 - RNA, 23 nt, Artificial Sequence
  Chemically synthesized
uuagaaaacaucccagaaaagug

SEQ ID NO: 83434 - RNA, 23 nt, Artificial Sequence
  Chemically synthesized
ggauucguugccugagcaauggc

SEQ ID NO: 83435 - RNA, 23 nt, Artificial Sequence
  Chemically synthesized
cggauucguugccugagcaaugg

SEQ ID NO: 83436 - RNA, 23 nt, Artificial Sequence
  Chemically synthesized
ucggauucguugccugagcaaug

SEQ ID NO: 83437 - RNA, 23 nt, Artificial Sequence
  Chemically synthesized
cucggauucguugccugagcaau

SEQ ID NO: 83438 - RNA, 23 nt, Artificial Sequence
  Chemically synthesized
acucggauucguugccugagcaa

SEQ ID NO: 83439 - RNA, 23 nt, Artificial Sequence
  Chemically synthesized
gugaaaccugaagaaggcagaga

SEQ ID NO: 83440 - RNA, 23 nt, Artificial Sequence
  Chemically synthesized
ggugaaaccugaagaaggcagag

SEQ ID NO: 83441 - RNA, 23 nt, Artificial Sequence
  Chemically synthesized
cggugaaaccugaagaaggcaga

SEQ ID NO: 83442 - RNA, 23 nt, Artificial Sequence
  Chemically synthesized
ccaaguucaugcagcuguggcag

SEQ ID NO: 83443 - RNA, 23 nt, Artificial Sequence
  Chemically synthesized
cccaaguucaugcagcuguggca

SEQ ID NO: 83444 - RNA, 23 nt, Artificial Sequence
  Chemically synthesized
gcccaaguucaugcagcuguggc

SEQ ID NO: 83445 - RNA, 23 nt, Artificial Sequence
  Chemically synthesized
guuuuugaaauggcuacgagagc

SEQ ID NO: 83446 - RNA, 23 nt, Artificial Sequence
  Chemically synthesized
gguuuuugaaauggcuacgagag

SEQ ID NO: 83447 - RNA, 23 nt, Artificial Sequence
  Chemically synthesized
gcaucuggcucuaauucacagug

SEQ ID NO: 83448 - RNA, 23 nt, Artificial Sequence
  Chemically synthesized
agcaucuggcucuaauucacagu

SEQ ID NO: 83449 - RNA, 23 nt, Artificial Sequence
  Chemically synthesized
aagcaucuggcucuaauucacag

SEQ ID NO: 83450 - RNA, 23 nt, Artificial Sequence
  Chemically synthesized
uaagcaucuggcucuaauucaca

SEQ ID NO: 83451 - RNA, 23 nt, Artificial Sequence
  Chemically synthesized
uuaagcaucuggcucuaauucac

SEQ ID NO: 83452 - RNA, 23 nt, Artificial Sequence
  Chemically synthesized
acaguguuugagaacuauguggc

SEQ ID NO: 83453 - RNA, 23 nt, Artificial Sequence
  Chemically synthesized
cacaguguuugagaacuaugugg

SEQ ID NO: 83454 - RNA, 23 nt, Artificial Sequence
  Chemically synthesized
uauguggcagauaucgaggugga

SEQ ID NO: 83455 - RNA, 23 nt, Artificial Sequence
  Chemically synthesized
auguguuuuuccaucgacagccc

SEQ ID NO: 83456 - RNA, 23 nt, Artificial Sequence
  Chemically synthesized
gauguguuuuuccaucgacagcc

SEQ ID NO: 83457 - RNA, 23 nt, Artificial Sequence
  Chemically synthesized
ugauguguuuuuccaucgacagc

SEQ ID NO: 83458 - RNA, 23 nt, Artificial Sequence
  Chemically synthesized
cugauguguuuuuccaucgacag

SEQ ID NO: 83459 - RNA, 23 nt, Artificial Sequence
  Chemically synthesized
acugauguguuuuuccaucgaca

SEQ ID NO: 83460 - RNA, 23 nt, Artificial Sequence
  Chemically synthesized
gaaugaugagcacacaaggcggg

SEQ ID NO: 83461 - RNA, 23 nt, Artificial Sequence
  Chemically synthesized
ggaaugaugagcacacaaggcgg

SEQ ID NO: 83462 - RNA, 23 nt, Artificial Sequence
  Chemically synthesized
aguauuuagaagccaacuaugau

SEQ ID NO: 83463 - RNA, 23 nt, Artificial Sequence
  Chemically synthesized
caguauuuagaagccaacuauga

SEQ ID NO: 83464 - RNA, 23 nt, Artificial Sequence
  Chemically synthesized
ccaguauuuagaagccaacuaug

SEQ ID NO: 83465 - RNA, 23 nt, Artificial Sequence
  Chemically synthesized
cuauuaucugucagcugcaaggu

SEQ ID NO: 83466 - RNA, 23 nt, Artificial Sequence
  Chemically synthesized
ccuauuaucugucagcugcaagg

SEQ ID NO: 83467 - RNA, 23 nt, Artificial Sequence
  Chemically synthesized
caucuggcucuaauucacagugc

SEQ ID NO: 83468 - RNA, 23 nt, Artificial Sequence
  Chemically synthesized
ucaugcagcuguggcagaguuac

SEQ ID NO: 83469 - RNA, 23 nt, Artificial Sequence
  Chemically synthesized
uucaugcagcuguggcagaguua

SEQ ID NO: 83470 - RNA, 23 nt, Artificial Sequence
  Chemically synthesized
ugguuucacgccugaggcaauua

SEQ ID NO: 83471 - RNA, 23 nt, Artificial Sequence
  Chemically synthesized
uugguuucacgccugaggcaauu

SEQ ID NO: 83472 - RNA, 23 nt, Artificial Sequence
  Chemically synthesized
auugguuucacgccugaggcaau

SEQ ID NO: 83473 - RNA, 23 nt, Artificial Sequence
  Chemically synthesized
uaugauuacuggccuuuuucauu

SEQ ID NO: 83474 - RNA, 23 nt, Artificial Sequence
  Chemically synthesized
guaugauuacuggccuuuuucau

SEQ ID NO: 83475 - RNA, 23 nt, Artificial Sequence
  Chemically synthesized
guuucauguuaguuaccuuauag

SEQ ID NO: 83476 - RNA, 23 nt, Artificial Sequence
  Chemically synthesized
gguuucauguuaguuaccuuaua

SEQ ID NO: 83477 - RNA, 23 nt, Artificial Sequence
  Chemically synthesized
ugguuucauguuaguuaccuuau

SEQ ID NO: 83478 - RNA, 23 nt, Artificial Sequence
  Chemically synthesized
gugguuucauguuaguuaccuua

SEQ ID NO: 83479 - RNA, 23 nt, Artificial Sequence
  Chemically synthesized
ugugguuucauguuaguuaccuu

SEQ ID NO: 83480 - RNA, 23 nt, Artificial Sequence
  Chemically synthesized
uuuugacacugcucuaacagccc

SEQ ID NO: 83481 - RNA, 23 nt, Artificial Sequence
  Chemically synthesized
cuuuugacacugcucuaacagcc

SEQ ID NO: 83482 - RNA, 23 nt, Artificial Sequence
  Chemically synthesized
cugucagcugcaagguacucugg

SEQ ID NO: 83483 - RNA, 23 nt, Artificial Sequence
  Chemically synthesized
ucugucagcugcaagguacucug

SEQ ID NO: 83484 - RNA, 23 nt, Artificial Sequence
  Chemically synthesized
aucugucagcugcaagguacucu

SEQ ID NO: 83485 - RNA, 23 nt, Artificial Sequence
  Chemically synthesized
uaucugucagcugcaagguacuc

SEQ ID NO: 83486 - RNA, 23 nt, Artificial Sequence
  Chemically synthesized
uuaucugucagcugcaagguacu

SEQ ID NO: 83487 - RNA, 23 nt, Artificial Sequence
  Chemically synthesized
agucagauggaaaauucauuuuu

SEQ ID NO: 83488 - RNA, 23 nt, Artificial Sequence
  Chemically synthesized
uguuggugauggagccuguggaa

SEQ ID NO: 83489 - RNA, 23 nt, Artificial Sequence
  Chemically synthesized
uuguuggugauggagccugugga

SEQ ID NO: 83490 - RNA, 23 nt, Artificial Sequence
  Chemically synthesized
auuguuggugauggagccugugg

SEQ ID NO: 83491 - RNA, 23 nt, Artificial Sequence
  Chemically synthesized
gauuguuggugauggagccugug

SEQ ID NO: 83492 - RNA, 23 nt, Artificial Sequence
  Chemically synthesized
ugauuguuggugauggagccugu

SEQ ID NO: 83493 - RNA, 23 nt, Artificial Sequence
  Chemically synthesized
uguaugauuacuggccuuuuuca

SEQ ID NO: 83494 - RNA, 23 nt, Artificial Sequence
  Chemically synthesized
cuauguggcagauaucgaggugg

SEQ ID NO: 83495 - RNA, 23 nt, Artificial Sequence
  Chemically synthesized
acuauguggcagauaucgaggug

SEQ ID NO: 83496 - RNA, 23 nt, Artificial Sequence
  Chemically synthesized
aacuauguggcagauaucgaggu

SEQ ID NO: 83497 - RNA, 23 nt, Artificial Sequence
  Chemically synthesized
gaacuauguggcagauaucgagg

SEQ ID NO: 83498 - RNA, 23 nt, Artificial Sequence
  Chemically synthesized
uagccaagaugaagcaggagccg

SEQ ID NO: 83499 - RNA, 23 nt, Artificial Sequence
  Chemically synthesized
cuagccaagaugaagcaggagcc

SEQ ID NO: 83500 - RNA, 23 nt, Artificial Sequence
  Chemically synthesized
gcuagccaagaugaagcaggagc

SEQ ID NO: 83501 - RNA, 23 nt, Artificial Sequence
  Chemically synthesized
uggauggaaagcagguagaguug

SEQ ID NO: 83502 - RNA, 23 nt, Artificial Sequence
  Chemically synthesized
guggauggaaagcagguagaguu

SEQ ID NO: 83503 - RNA, 23 nt, Artificial Sequence
  Chemically synthesized
cugugguuucauguuaguuaccu

SEQ ID NO: 83504 - RNA, 23 nt, Artificial Sequence
  Chemically synthesized
ucugugguuucauguuaguuacc

SEQ ID NO: 83505 - RNA, 23 nt, Artificial Sequence
  Chemically synthesized
uucugugguuucauguuaguuac

SEQ ID NO: 83506 - RNA, 23 nt, Artificial Sequence
  Chemically synthesized
guucugugguuucauguuaguua

SEQ ID NO: 83507 - RNA, 23 nt, Artificial Sequence
  Chemically synthesized
uuggugauggagccuguggaaag

SEQ ID NO: 83508 - RNA, 23 nt, Artificial Sequence
  Chemically synthesized
guuggugauggagccuguggaaa

SEQ ID NO: 83509 - RNA, 23 nt, Artificial Sequence
  Chemically synthesized
ggauggaaagcagguagaguugg

SEQ ID NO: 83510 - RNA, 23 nt, Artificial Sequence
  Chemically synthesized
gucagauggaaaauucauuuuuu

SEQ ID NO: 83511 - RNA, 23 nt, Artificial Sequence
  Chemically synthesized
ccuuaugcgguuaauuuugaagu

SEQ ID NO: 83512 - RNA, 23 nt, Artificial Sequence
  Chemically synthesized
aguucugugguuucauguuaguu

SEQ ID NO: 83513 - RNA, 23 nt, Artificial Sequence
  Chemically synthesized
caguucugugguuucauguuagu

SEQ ID NO: 83514 - RNA, 23 nt, Artificial Sequence
  Chemically synthesized
acaguucugugguuucauguuag

SEQ ID NO: 83515 - RNA, 23 nt, Artificial Sequence
  Chemically synthesized
uacaguucugugguuucauguua

SEQ ID NO: 83516 - RNA, 23 nt, Artificial Sequence
  Chemically synthesized
uauuaucugucagcugcaaggua

SEQ ID NO: 83517 - RNA, 23 nt, Artificial Sequence
  Chemically synthesized
augggcucaaccagaaaagccca

SEQ ID NO: 83518 - RNA, 23 nt, Artificial Sequence
  Chemically synthesized
aaugggcucaaccagaaaagccc

SEQ ID NO: 83519 - RNA, 23 nt, Artificial Sequence
  Chemically synthesized
guggcagaguuacaguucugugg

SEQ ID NO: 83520 - RNA, 23 nt, Artificial Sequence
  Chemically synthesized
uguggcagaguuacaguucugug

SEQ ID NO: 83521 - RNA, 23 nt, Artificial Sequence
  Chemically synthesized
cuguggcagaguuacaguucugu

SEQ ID NO: 83522 - RNA, 23 nt, Artificial Sequence
  Chemically synthesized
gcuguggcagaguuacaguucug

SEQ ID NO: 83523 - RNA, 23 nt, Artificial Sequence
  Chemically synthesized
agcuguggcagaguuacaguucu

SEQ ID NO: 83524 - RNA, 23 nt, Artificial Sequence
  Chemically synthesized
gggcaggaagauuaugaucgccu

SEQ ID NO: 83525 - RNA, 23 nt, Artificial Sequence
  Chemically synthesized
gauggaaagcagguagaguuggc

SEQ ID NO: 83526 - RNA, 23 nt, Artificial Sequence
  Chemically synthesized
gcuacgagagcugcucugcaagc

SEQ ID NO: 83527 - RNA, 23 nt, Artificial Sequence
  Chemically synthesized
ggcuacgagagcugcucugcaag

SEQ ID NO: 83528 - RNA, 23 nt, Artificial Sequence
  Chemically synthesized
uggcuacgagagcugcucugcaa

SEQ ID NO: 83529 - RNA, 23 nt, Artificial Sequence
  Chemically synthesized
cgauguuauacugauguguuuuu

SEQ ID NO: 83530 - RNA, 23 nt, Artificial Sequence
  Chemically synthesized
ccgauguuauacugauguguuuu

SEQ ID NO: 83531 - RNA, 23 nt, Artificial Sequence
  Chemically synthesized
accgauguuauacugauguguuu

SEQ ID NO: 83532 - RNA, 23 nt, Artificial Sequence
  Chemically synthesized
uaccgauguuauacugauguguu

SEQ ID NO: 83533 - RNA, 23 nt, Artificial Sequence
  Chemically synthesized
auaccgauguuauacugaugugu

SEQ ID NO: 83534 - RNA, 23 nt, Artificial Sequence
  Chemically synthesized
aucgagguggauggaaagcaggu

SEQ ID NO: 83535 - RNA, 23 nt, Artificial Sequence
  Chemically synthesized
gcaagguacucuggugagucacc

SEQ ID NO: 83536 - RNA, 23 nt, Artificial Sequence
  Chemically synthesized
ugcaagguacucuggugagucac

SEQ ID NO: 83537 - RNA, 23 nt, Artificial Sequence
  Chemically synthesized
cugcaagguacucuggugaguca

SEQ ID NO: 83538 - RNA, 23 nt, Artificial Sequence
  Chemically synthesized
agguagaguuggcuuugugggac

SEQ ID NO: 83539 - RNA, 23 nt, Artificial Sequence
  Chemically synthesized
cagguagaguuggcuuuguggga

SEQ ID NO: 83540 - RNA, 23 nt, Artificial Sequence
  Chemically synthesized
gaguuacaguucugugguuucau

SEQ ID NO: 83541 - RNA, 23 nt, Artificial Sequence
  Chemically synthesized
agaguuacaguucugugguuuca

SEQ ID NO: 83542 - RNA, 23 nt, Artificial Sequence
  Chemically synthesized
cagaguuacaguucugugguuuc

SEQ ID NO: 83543 - RNA, 23 nt, Artificial Sequence
  Chemically synthesized
gacucggauucguugccugagca

SEQ ID NO: 83544 - RNA, 23 nt, Artificial Sequence
  Chemically synthesized
ggacucggauucguugccugagc

SEQ ID NO: 83545 - RNA, 23 nt, Artificial Sequence
  Chemically synthesized
uggacucggauucguugccugag

SEQ ID NO: 83546 - RNA, 23 nt, Artificial Sequence
  Chemically synthesized
cuggacucggauucguugccuga

SEQ ID NO: 83547 - RNA, 23 nt, Artificial Sequence
  Chemically synthesized
gcugcaagguacucuggugaguc

SEQ ID NO: 83548 - RNA, 23 nt, Artificial Sequence
  Chemically synthesized
agcugcaagguacucuggugagu

SEQ ID NO: 83549 - RNA, 23 nt, Artificial Sequence
  Chemically synthesized
cagcugcaagguacucuggugag

SEQ ID NO: 83550 - RNA, 23 nt, Artificial Sequence
  Chemically synthesized
ucagcugcaagguacucugguga

SEQ ID NO: 83551 - RNA, 23 nt, Artificial Sequence
  Chemically synthesized
accccagaagucaagcauuucug

SEQ ID NO: 83552 - RNA, 23 nt, Artificial Sequence
  Chemically synthesized
gaccccagaagucaagcauuucu

SEQ ID NO: 83553 - RNA, 23 nt, Artificial Sequence
  Chemically synthesized
gcagguagaguuggcuuuguggg

SEQ ID NO: 83554 - RNA, 23 nt, Artificial Sequence
  Chemically synthesized
agcagguagaguuggcuuugugg

SEQ ID NO: 83555 - RNA, 23 nt, Artificial Sequence
  Chemically synthesized
caggagccggugaaaccugaaga

SEQ ID NO: 83556 - RNA, 23 nt, Artificial Sequence
  Chemically synthesized
uaucgagguggauggaaagcagg

SEQ ID NO: 83557 - RNA, 23 nt, Artificial Sequence
  Chemically synthesized
guuuugucacuuuuucugauaaa

SEQ ID NO: 83558 - RNA, 23 nt, Artificial Sequence
  Chemically synthesized
cuugugaaaccuugcugcaagca

SEQ ID NO: 83559 - RNA, 23 nt, Artificial Sequence
  Chemically synthesized
ucuugugaaaccuugcugcaagc

SEQ ID NO: 83560 - RNA, 23 nt, Artificial Sequence
  Chemically synthesized
gauaccgauguuauacugaugug

SEQ ID NO: 83561 - RNA, 23 nt, Artificial Sequence
  Chemically synthesized
agauaccgauguuauacugaugu

SEQ ID NO: 83562 - RNA, 23 nt, Artificial Sequence
  Chemically synthesized
cagauaccgauguuauacugaug

SEQ ID NO: 83563 - RNA, 23 nt, Artificial Sequence
  Chemically synthesized
ccagauaccgauguuauacugau

SEQ ID NO: 83564 - RNA, 23 nt, Artificial Sequence
  Chemically synthesized
auuagacacuuuggaagauggca

SEQ ID NO: 83565 - RNA, 23 nt, Artificial Sequence
  Chemically synthesized
ggaauuucuuaacuucuugcuuc

SEQ ID NO: 83566 - RNA, 23 nt, Artificial Sequence
  Chemically synthesized
aggaauuucuuaacuucuugcuu

SEQ ID NO: 83567 - RNA, 23 nt, Artificial Sequence
  Chemically synthesized
aaggaauuucuuaacuucuugcu

SEQ ID NO: 83568 - RNA, 23 nt, Artificial Sequence
  Chemically synthesized
caaggaauuucuuaacuucuugc

SEQ ID NO: 83569 - RNA, 23 nt, Artificial Sequence
  Chemically synthesized
ucaaggaauuucuuaacuucuug

SEQ ID NO: 83570 - RNA, 23 nt, Artificial Sequence
  Chemically synthesized
ccuguggaaagacaugcuugcuc

SEQ ID NO: 83571 - RNA, 23 nt, Artificial Sequence
  Chemically synthesized
gccuguggaaagacaugcuugcu

SEQ ID NO: 83572 - RNA, 23 nt, Artificial Sequence
  Chemically synthesized
agccuguggaaagacaugcuugc

SEQ ID NO: 83573 - RNA, 23 nt, Artificial Sequence
  Chemically synthesized
gagccuguggaaagacaugcuug

SEQ ID NO: 83574 - RNA, 23 nt, Artificial Sequence
  Chemically synthesized
cugacacaccaggcgcuaauuca

SEQ ID NO: 83575 - RNA, 23 nt, Artificial Sequence
  Chemically synthesized
ccugacacaccaggcgcuaauuc

SEQ ID NO: 83576 - RNA, 23 nt, Artificial Sequence
  Chemically synthesized
accugacacaccaggcgcuaauu

SEQ ID NO: 83577 - RNA, 23 nt, Artificial Sequence
  Chemically synthesized
caccugacacaccaggcgcuaau

SEQ ID NO: 83578 - RNA, 23 nt, Artificial Sequence
  Chemically synthesized
uucaaggaauuucuuaacuucuu

SEQ ID NO: 83579 - RNA, 23 nt, Artificial Sequence
  Chemically synthesized
auucaaggaauuucuuaacuucu

SEQ ID NO: 83580 - RNA, 23 nt, Artificial Sequence
  Chemically synthesized
aauucaaggaauuucuuaacuuc

SEQ ID NO: 83581 - RNA, 23 nt, Artificial Sequence
  Chemically synthesized
ucuccuacccagauaccgauguu

SEQ ID NO: 83582 - RNA, 23 nt, Artificial Sequence
  Chemically synthesized
cucuccuacccagauaccgaugu

SEQ ID NO: 83583 - RNA, 23 nt, Artificial Sequence
  Chemically synthesized
ccucuccuacccagauaccgaug

SEQ ID NO: 83584 - RNA, 23 nt, Artificial Sequence
  Chemically synthesized
cccucuccuacccagauaccgau

SEQ ID NO: 83585 - RNA, 23 nt, Artificial Sequence
  Chemically synthesized
ccccucuccuacccagauaccga

SEQ ID NO: 83586 - RNA, 23 nt, Artificial Sequence
  Chemically synthesized
acuuuggaagauggcauaaccug

SEQ ID NO: 83587 - RNA, 23 nt, Artificial Sequence
  Chemically synthesized
ucuggcucuaauucacagugcuc

SEQ ID NO: 83588 - RNA, 23 nt, Artificial Sequence
  Chemically synthesized
aucuggcucuaauucacagugcu

SEQ ID NO: 83589 - RNA, 23 nt, Artificial Sequence
  Chemically synthesized
guucagcaaagaccaaagaugga

SEQ ID NO: 83590 - RNA, 23 nt, Artificial Sequence
  Chemically synthesized
uacugauguguuuuuccaucgac

SEQ ID NO: 83591 - RNA, 23 nt, Artificial Sequence
  Chemically synthesized
auacugauguguuuuuccaucga

SEQ ID NO: 83592 - RNA, 23 nt, Artificial Sequence
  Chemically synthesized
uauacugauguguuuuuccaucg

SEQ ID NO: 83593 - RNA, 23 nt, Artificial Sequence
  Chemically synthesized
uuauacugauguguuuuuccauc

SEQ ID NO: 83594 - RNA, 23 nt, Artificial Sequence
  Chemically synthesized
guuauacugauguguuuuuccau

SEQ ID NO: 83595 - RNA, 23 nt, Artificial Sequence
  Chemically synthesized
uccuacccagauaccgauguuau

SEQ ID NO: 83596 - RNA, 23 nt, Artificial Sequence
  Chemically synthesized
aaggaccaguucccagaggugua

SEQ ID NO: 83597 - RNA, 23 nt, Artificial Sequence
  Chemically synthesized
aaaucugggugccuugucuugug

SEQ ID NO: 83598 - RNA, 23 nt, Artificial Sequence
  Chemically synthesized
aaaaucugggugccuugucuugu

SEQ ID NO: 83599 - RNA, 23 nt, Artificial Sequence
  Chemically synthesized
aaaaaucugggugccuugucuug

SEQ ID NO: 83600 - RNA, 23 nt, Artificial Sequence
  Chemically synthesized
aaaaaaucugggugccuugucuu

SEQ ID NO: 83601 - RNA, 23 nt, Artificial Sequence
  Chemically synthesized
aguucaugcagcuguggcagagu

SEQ ID NO: 83602 - RNA, 23 nt, Artificial Sequence
  Chemically synthesized
aaguucaugcagcuguggcagag

SEQ ID NO: 83603 - RNA, 23 nt, Artificial Sequence
  Chemically synthesized
caaguucaugcagcuguggcaga

SEQ ID NO: 83604 - RNA, 23 nt, Artificial Sequence
  Chemically synthesized
cucucuucucuccagcugacuaa

SEQ ID NO: 83605 - RNA, 23 nt, Artificial Sequence
  Chemically synthesized
ucucucuucucuccagcugacua

SEQ ID NO: 83606 - RNA, 23 nt, Artificial Sequence
  Chemically synthesized
gucucucuucucuccagcugacu

SEQ ID NO: 83607 - RNA, 23 nt, Artificial Sequence
  Chemically synthesized
agucucucuucucuccagcugac

SEQ ID NO: 83608 - RNA, 23 nt, Artificial Sequence
  Chemically synthesized
ucuucucuccagcugacuaaacu

SEQ ID NO: 83609 - RNA, 23 nt, Artificial Sequence
  Chemically synthesized
cucuucucuccagcugacuaaac

SEQ ID NO: 83610 - RNA, 23 nt, Artificial Sequence
  Chemically synthesized
ucucuucucuccagcugacuaaa

SEQ ID NO: 83611 - RNA, 23 nt, Artificial Sequence
  Chemically synthesized
gauguuauacugauguguuuuuc

SEQ ID NO: 83612 - RNA, 23 nt, Artificial Sequence
  Chemically synthesized
aauuagacacuuuggaagauggc

SEQ ID NO: 83613 - RNA, 23 nt, Artificial Sequence
  Chemically synthesized
ggcugccauccggaagaaacugg

SEQ ID NO: 83614 - RNA, 23 nt, Artificial Sequence
  Chemically synthesized
uggcugccauccggaagaaacug

SEQ ID NO: 83615 - RNA, 23 nt, Artificial Sequence
  Chemically synthesized
auggcugccauccggaagaaacu

SEQ ID NO: 83616 - RNA, 23 nt, Artificial Sequence
  Chemically synthesized
uugugaaaccuugcugcaagcac

SEQ ID NO: 83617 - RNA, 23 nt, Artificial Sequence
  Chemically synthesized
aagcagguagaguuggcuuugug

SEQ ID NO: 83618 - RNA, 23 nt, Artificial Sequence
  Chemically synthesized
cuuaagcaucuggcucuaauuca

SEQ ID NO: 83619 - RNA, 23 nt, Artificial Sequence
  Chemically synthesized
ccggugaaaccugaagaaggcag

SEQ ID NO: 83620 - RNA, 23 nt, Artificial Sequence
  Chemically synthesized
uuacaguucugugguuucauguu

SEQ ID NO: 83621 - RNA, 23 nt, Artificial Sequence
  Chemically synthesized
guuacaguucugugguuucaugu

SEQ ID NO: 83622 - RNA, 23 nt, Artificial Sequence
  Chemically synthesized
auuaucugucagcugcaagguac

SEQ ID NO: 83623 - RNA, 23 nt, Artificial Sequence
  Chemically synthesized
cuuaacuucuugcuucuuucuag

SEQ ID NO: 83624 - RNA, 23 nt, Artificial Sequence
  Chemically synthesized
ggacacagcugggcaggaagauu

SEQ ID NO: 83625 - RNA, 23 nt, Artificial Sequence
  Chemically synthesized
gaucuucggaaugaugagcacac

SEQ ID NO: 83626 - RNA, 23 nt, Artificial Sequence
  Chemically synthesized
agauuaugaucgccugaggcccc

SEQ ID NO: 83627 - RNA, 23 nt, Artificial Sequence
  Chemically synthesized
aagauuaugaucgccugaggccc

SEQ ID NO: 83628 - RNA, 23 nt, Artificial Sequence
  Chemically synthesized
gcccaccaggguccuuuugacac

SEQ ID NO: 83629 - RNA, 23 nt, Artificial Sequence
  Chemically synthesized
ggcccaccaggguccuuuugaca

SEQ ID NO: 83630 - RNA, 23 nt, Artificial Sequence
  Chemically synthesized
aauucacagugcucuuuucuccu

SEQ ID NO: 83631 - RNA, 23 nt, Artificial Sequence
  Chemically synthesized
uuaaauucccguuuugucacuuu

SEQ ID NO: 83632 - RNA, 23 nt, Artificial Sequence
  Chemically synthesized
uuuaaauucccguuuugucacuu

SEQ ID NO: 83633 - RNA, 23 nt, Artificial Sequence
  Chemically synthesized
uuuuaaauucccguuuugucacu

SEQ ID NO: 83634 - RNA, 23 nt, Artificial Sequence
  Chemically synthesized
uuuuuaaauucccguuuugucac

SEQ ID NO: 83635 - RNA, 23 nt, Artificial Sequence
  Chemically synthesized
uuuuuuaaauucccguuuuguca

SEQ ID NO: 83636 - RNA, 23 nt, Artificial Sequence
  Chemically synthesized
ucaccacuucagggcuuuacucc

SEQ ID NO: 83637 - RNA, 23 nt, Artificial Sequence
  Chemically synthesized
gucaccacuucagggcuuuacuc

SEQ ID NO: 83638 - RNA, 23 nt, Artificial Sequence
  Chemically synthesized
agucaccacuucagggcuuuacu

SEQ ID NO: 83639 - RNA, 23 nt, Artificial Sequence
  Chemically synthesized
gagucaccacuucagggcuuuac

SEQ ID NO: 83640 - RNA, 23 nt, Artificial Sequence
  Chemically synthesized
ugagucaccacuucagggcuuua

SEQ ID NO: 83641 - RNA, 23 nt, Artificial Sequence
  Chemically synthesized
uguuauacugauguguuuuucca

SEQ ID NO: 83642 - RNA, 23 nt, Artificial Sequence
  Chemically synthesized
gauucguugccugagcaauggcu

SEQ ID NO: 83643 - RNA, 23 nt, Artificial Sequence
  Chemically synthesized
ggaaagcagguagaguuggcuuu

SEQ ID NO: 83644 - RNA, 23 nt, Artificial Sequence
  Chemically synthesized
gaaaacaucccagaaaaguggac

SEQ ID NO: 83645 - RNA, 23 nt, Artificial Sequence
  Chemically synthesized
agaaaacaucccagaaaagugga

SEQ ID NO: 83646 - RNA, 23 nt, Artificial Sequence
  Chemically synthesized
cuggugagucaccacuucagggc

SEQ ID NO: 83647 - RNA, 23 nt, Artificial Sequence
  Chemically synthesized
ucuggugagucaccacuucaggg

SEQ ID NO: 83648 - RNA, 23 nt, Artificial Sequence
  Chemically synthesized
cucugcaagcuagacgugggaag

SEQ ID NO: 83649 - RNA, 23 nt, Artificial Sequence
  Chemically synthesized
gcucugcaagcuagacgugggaa

SEQ ID NO: 83650 - RNA, 23 nt, Artificial Sequence
  Chemically synthesized
cuccuacccagauaccgauguua

SEQ ID NO: 83651 - RNA, 23 nt, Artificial Sequence
  Chemically synthesized
aggagccaccaguucucaugggu

SEQ ID NO: 83652 - RNA, 23 nt, Artificial Sequence
  Chemically synthesized
gaggagccaccaguucucauggg

SEQ ID NO: 83653 - RNA, 23 nt, Artificial Sequence
  Chemically synthesized
agaggagccaccaguucucaugg

SEQ ID NO: 83654 - RNA, 23 nt, Artificial Sequence
  Chemically synthesized
cagaggagccaccaguucucaug

SEQ ID NO: 83655 - RNA, 23 nt, Artificial Sequence
  Chemically synthesized
ccagaggagccaccaguucucau

SEQ ID NO: 83656 - RNA, 23 nt, Artificial Sequence
  Chemically synthesized
ucucguuaguccacggucugguc

SEQ ID NO: 83657 - RNA, 23 nt, Artificial Sequence
  Chemically synthesized
cucucguuaguccacggucuggu

SEQ ID NO: 83658 - RNA, 23 nt, Artificial Sequence
  Chemically synthesized
ucucucguuaguccacggucugg

SEQ ID NO: 83659 - RNA, 23 nt, Artificial Sequence
  Chemically synthesized
uucucucguuaguccacggucug

SEQ ID NO: 83660 - RNA, 23 nt, Artificial Sequence
  Chemically synthesized
guucucucguuaguccacggucu

SEQ ID NO: 83661 - RNA, 23 nt, Artificial Sequence
  Chemically synthesized
auggaaagcagguagaguuggcu

SEQ ID NO: 83662 - RNA, 23 nt, Artificial Sequence
  Chemically synthesized
uguucagcaaagaccaaagaugg

SEQ ID NO: 83663 - RNA, 23 nt, Artificial Sequence
  Chemically synthesized
aguucucauggguggcacucagu

SEQ ID NO: 83664 - RNA, 23 nt, Artificial Sequence
  Chemically synthesized
caguucucauggguggcacucag

SEQ ID NO: 83665 - RNA, 23 nt, Artificial Sequence
  Chemically synthesized
accaguucucauggguggcacuc

SEQ ID NO: 83666 - RNA, 23 nt, Artificial Sequence
  Chemically synthesized
caccaguucucauggguggcacu

SEQ ID NO: 83667 - RNA, 23 nt, Artificial Sequence
  Chemically synthesized
ucuuuucuccucacuguauccag

SEQ ID NO: 83668 - RNA, 23 nt, Artificial Sequence
  Chemically synthesized
ccacuucagggcuuuacuccgua

SEQ ID NO: 83669 - RNA, 23 nt, Artificial Sequence
  Chemically synthesized
cuuuuucugauaaaagauggcca

SEQ ID NO: 83670 - RNA, 23 nt, Artificial Sequence
  Chemically synthesized
ccaguuaauuuuuccaacuacua

SEQ ID NO: 83671 - RNA, 23 nt, Artificial Sequence
  Chemically synthesized
gguucucucguuaguccacgguc

SEQ ID NO: 83672 - RNA, 23 nt, Artificial Sequence
  Chemically synthesized
gucagcugcaagguacucuggug

SEQ ID NO: 83673 - RNA, 23 nt, Artificial Sequence
  Chemically synthesized
ugucagcugcaagguacucuggu

SEQ ID NO: 83674 - RNA, 23 nt, Artificial Sequence
  Chemically synthesized
agaaaagcccaaguucaugcagc

SEQ ID NO: 83675 - RNA, 23 nt, Artificial Sequence
  Chemically synthesized
aguuacaguucugugguuucaug

SEQ ID NO: 83676 - RNA, 23 nt, Artificial Sequence
  Chemically synthesized
uggaaagcagguagaguuggcuu

SEQ ID NO: 83677 - RNA, 23 nt, Artificial Sequence
  Chemically synthesized
uguguuuuuccaucgacagcccu

SEQ ID NO: 83678 - RNA, 23 nt, Artificial Sequence
  Chemically synthesized
guuauaaaguaguuacagccuaa

SEQ ID NO: 83679 - RNA, 23 nt, Artificial Sequence
  Chemically synthesized
ccucucucacuccaucuuugguc

SEQ ID NO: 83680 - RNA, 23 nt, Artificial Sequence
  Chemically synthesized
ucaguauaacaucgguaucuggg

SEQ ID NO: 83681 - RNA, 23 nt, Artificial Sequence
  Chemically synthesized
caguauaacaucgguaucugggu

SEQ ID NO: 83682 - RNA, 23 nt, Artificial Sequence
  Chemically synthesized
aguauaacaucgguaucugggua

SEQ ID NO: 83683 - RNA, 23 nt, Artificial Sequence
  Chemically synthesized
guauaacaucgguaucuggguag

SEQ ID NO: 83684 - RNA, 23 nt, Artificial Sequence
  Chemically synthesized
uauaacaucgguaucuggguagg

SEQ ID NO: 83685 - RNA, 23 nt, Artificial Sequence
  Chemically synthesized
accucucucacuccaucuuuggu

SEQ ID NO: 83686 - RNA, 23 nt, Artificial Sequence
  Chemically synthesized
cggguuggacaucguuaauaauc

SEQ ID NO: 83687 - RNA, 23 nt, Artificial Sequence
  Chemically synthesized
uuucuaaacuaucagggcugucg

SEQ ID NO: 83688 - RNA, 23 nt, Artificial Sequence
  Chemically synthesized
uccuauuuacuuagcccagcucc

SEQ ID NO: 83689 - RNA, 23 nt, Artificial Sequence
  Chemically synthesized
ccuauuuacuuagcccagcucca

SEQ ID NO: 83690 - RNA, 23 nt, Artificial Sequence
  Chemically synthesized
cuauuuacuuagcccagcuccau

SEQ ID NO: 83691 - RNA, 23 nt, Artificial Sequence
  Chemically synthesized
uauuuacuuagcccagcuccaug

SEQ ID NO: 83692 - RNA, 23 nt, Artificial Sequence
  Chemically synthesized
auuuacuuagcccagcuccaugg

SEQ ID NO: 83693 - RNA, 23 nt, Artificial Sequence
  Chemically synthesized
ucaaaaaccucucucacuccauc

SEQ ID NO: 83694 - RNA, 23 nt, Artificial Sequence
  Chemically synthesized
uuuuuagaaaacugccuuuauuc

SEQ ID NO: 83695 - RNA, 23 nt, Artificial Sequence
  Chemically synthesized
uuuuagaaaacugccuuuauucu

SEQ ID NO: 83696 - RNA, 23 nt, Artificial Sequence
  Chemically synthesized
uuuagaaaacugccuuuauucua

SEQ ID NO: 83697 - RNA, 23 nt, Artificial Sequence
  Chemically synthesized
uuccuauuuacuuagcccagcuc

SEQ ID NO: 83698 - RNA, 23 nt, Artificial Sequence
  Chemically synthesized
uuuacuuagcccagcuccauggg

SEQ ID NO: 83699 - RNA, 23 nt, Artificial Sequence
  Chemically synthesized
uuacuuagcccagcuccaugggg

SEQ ID NO: 83700 - RNA, 23 nt, Artificial Sequence
  Chemically synthesized
uacuuagcccagcuccauggggu

SEQ ID NO: 83701 - RNA, 23 nt, Artificial Sequence
  Chemically synthesized
acuaugagcaagcaugucuuucc

SEQ ID NO: 83702 - RNA, 23 nt, Artificial Sequence
  Chemically synthesized
cuaugagcaagcaugucuuucca

SEQ ID NO: 83703 - RNA, 23 nt, Artificial Sequence
  Chemically synthesized
uaugagcaagcaugucuuuccac

SEQ ID NO: 83704 - RNA, 23 nt, Artificial Sequence
  Chemically synthesized
augagcaagcaugucuuuccaca

SEQ ID NO: 83705 - RNA, 23 nt, Artificial Sequence
  Chemically synthesized
ugagcaagcaugucuuuccacag

SEQ ID NO: 83706 - RNA, 23 nt, Artificial Sequence
  Chemically synthesized
ugccuucuucagguuucaccggc

SEQ ID NO: 83707 - RNA, 23 nt, Artificial Sequence
  Chemically synthesized
gccuucuucagguuucaccggcu

SEQ ID NO: 83708 - RNA, 23 nt, Artificial Sequence
  Chemically synthesized
ccuucuucagguuucaccggcuc

SEQ ID NO: 83709 - RNA, 23 nt, Artificial Sequence
  Chemically synthesized
cuucuucagguuucaccggcucc

SEQ ID NO: 83710 - RNA, 23 nt, Artificial Sequence
  Chemically synthesized
uucuucagguuucaccggcuccu

SEQ ID NO: 83711 - RNA, 23 nt, Artificial Sequence
  Chemically synthesized
cugcuuuccauccaccucgauau

SEQ ID NO: 83712 - RNA, 23 nt, Artificial Sequence
  Chemically synthesized
ugcuuuccauccaccucgauauc

SEQ ID NO: 83713 - RNA, 23 nt, Artificial Sequence
  Chemically synthesized
gcuuuccauccaccucgauaucu

SEQ ID NO: 83714 - RNA, 23 nt, Artificial Sequence
  Chemically synthesized
cuuuccauccaccucgauaucug

SEQ ID NO: 83715 - RNA, 23 nt, Artificial Sequence
  Chemically synthesized
uuuccauccaccucgauaucugc

SEQ ID NO: 83716 - RNA, 23 nt, Artificial Sequence
  Chemically synthesized
cacauaguucucaaacacugugg

SEQ ID NO: 83717 - RNA, 23 nt, Artificial Sequence
  Chemically synthesized
acauaguucucaaacacuguggg

SEQ ID NO: 83718 - RNA, 23 nt, Artificial Sequence
  Chemically synthesized
cauaguucucaaacacugugggc

SEQ ID NO: 83719 - RNA, 23 nt, Artificial Sequence
  Chemically synthesized
auaguucucaaacacugugggca

SEQ ID NO: 83720 - RNA, 23 nt, Artificial Sequence
  Chemically synthesized
uaguucucaaacacugugggcac

SEQ ID NO: 83721 - RNA, 23 nt, Artificial Sequence
  Chemically synthesized
caugucuuuccacaggcuccauc

SEQ ID NO: 83722 - RNA, 23 nt, Artificial Sequence
  Chemically synthesized
augucuuuccacaggcuccauca

SEQ ID NO: 83723 - RNA, 23 nt, Artificial Sequence
  Chemically synthesized
ugucuuuccacaggcuccaucac

SEQ ID NO: 83724 - RNA, 23 nt, Artificial Sequence
  Chemically synthesized
gucuuuccacaggcuccaucacc

SEQ ID NO: 83725 - RNA, 23 nt, Artificial Sequence
  Chemically synthesized
ucuuuccacaggcuccaucacca

SEQ ID NO: 83726 - RNA, 23 nt, Artificial Sequence
  Chemically synthesized
cuuuucugguugagcccauuuuc

SEQ ID NO: 83727 - RNA, 23 nt, Artificial Sequence
  Chemically synthesized
uuuucugguugagcccauuuuca

SEQ ID NO: 83728 - RNA, 23 nt, Artificial Sequence
  Chemically synthesized
uuucugguugagcccauuuucaa

SEQ ID NO: 83729 - RNA, 23 nt, Artificial Sequence
  Chemically synthesized
uucugguugagcccauuuucaaa

SEQ ID NO: 83730 - RNA, 23 nt, Artificial Sequence
  Chemically synthesized
ucugguugagcccauuuucaaaa

SEQ ID NO: 83731 - RNA, 23 nt, Artificial Sequence
  Chemically synthesized
auaguuggcuucuaaauacuggu

SEQ ID NO: 83732 - RNA, 23 nt, Artificial Sequence
  Chemically synthesized
aagcaugucuuuccacaggcucc

SEQ ID NO: 83733 - RNA, 23 nt, Artificial Sequence
  Chemically synthesized
agcaugucuuuccacaggcucca

SEQ ID NO: 83734 - RNA, 23 nt, Artificial Sequence
  Chemically synthesized
gcaugucuuuccacaggcuccau

SEQ ID NO: 83735 - RNA, 23 nt, Artificial Sequence
  Chemically synthesized
ggguaauauggccaucuuuuauc

SEQ ID NO: 83736 - RNA, 23 nt, Artificial Sequence
  Chemically synthesized
gaucauaaucuuccugcccagcu

SEQ ID NO: 83737 - RNA, 23 nt, Artificial Sequence
  Chemically synthesized
aucauaaucuuccugcccagcug

SEQ ID NO: 83738 - RNA, 23 nt, Artificial Sequence
  Chemically synthesized
ucauaaucuuccugcccagcugu

SEQ ID NO: 83739 - RNA, 23 nt, Artificial Sequence
  Chemically synthesized
cauaaucuuccugcccagcugug

SEQ ID NO: 83740 - RNA, 23 nt, Artificial Sequence
  Chemically synthesized
auaaucuuccugcccagcugugu

SEQ ID NO: 83741 - RNA, 23 nt, Artificial Sequence
  Chemically synthesized
uuccauccaccucgauaucugcc

SEQ ID NO: 83742 - RNA, 23 nt, Artificial Sequence
  Chemically synthesized
uccauccaccucgauaucugcca

SEQ ID NO: 83743 - RNA, 23 nt, Artificial Sequence
  Chemically synthesized
ccauccaccucgauaucugccac

SEQ ID NO: 83744 - RNA, 23 nt, Artificial Sequence
  Chemically synthesized
cauccaccucgauaucugccaca

SEQ ID NO: 83745 - RNA, 23 nt, Artificial Sequence
  Chemically synthesized
auccaccucgauaucugccacau

SEQ ID NO: 83746 - RNA, 23 nt, Artificial Sequence
  Chemically synthesized
aauuuuccaucugacuuuauuuc

SEQ ID NO: 83747 - RNA, 23 nt, Artificial Sequence
  Chemically synthesized
auuuuccaucugacuuuauuucc

SEQ ID NO: 83748 - RNA, 23 nt, Artificial Sequence
  Chemically synthesized
gaacuguaacucugccacagcug

SEQ ID NO: 83749 - RNA, 23 nt, Artificial Sequence
  Chemically synthesized
aacuguaacucugccacagcugc

SEQ ID NO: 83750 - RNA, 23 nt, Artificial Sequence
  Chemically synthesized
acuguaacucugccacagcugca

SEQ ID NO: 83751 - RNA, 23 nt, Artificial Sequence
  Chemically synthesized
cuguaacucugccacagcugcau

SEQ ID NO: 83752 - RNA, 23 nt, Artificial Sequence
  Chemically synthesized
uguaacucugccacagcugcaug

SEQ ID NO: 83753 - RNA, 23 nt, Artificial Sequence
  Chemically synthesized
acucuaccugcuuuccauccacc

SEQ ID NO: 83754 - RNA, 23 nt, Artificial Sequence
  Chemically synthesized
cucuaccugcuuuccauccaccu

SEQ ID NO: 83755 - RNA, 23 nt, Artificial Sequence
  Chemically synthesized
ucuaccugcuuuccauccaccuc

SEQ ID NO: 83756 - RNA, 23 nt, Artificial Sequence
  Chemically synthesized
cuaccugcuuuccauccaccucg

SEQ ID NO: 83757 - RNA, 23 nt, Artificial Sequence
  Chemically synthesized
uaccugcuuuccauccaccucga

SEQ ID NO: 83758 - RNA, 23 nt, Artificial Sequence
  Chemically synthesized
cucgauaucugccacauaguucu

SEQ ID NO: 83759 - RNA, 23 nt, Artificial Sequence
  Chemically synthesized
ucgauaucugccacauaguucuc

SEQ ID NO: 83760 - RNA, 23 nt, Artificial Sequence
  Chemically synthesized
cgauaucugccacauaguucuca

SEQ ID NO: 83761 - RNA, 23 nt, Artificial Sequence
  Chemically synthesized
gauaucugccacauaguucucaa

SEQ ID NO: 83762 - RNA, 23 nt, Artificial Sequence
  Chemically synthesized
auaucugccacauaguucucaaa

SEQ ID NO: 83763 - RNA, 23 nt, Artificial Sequence
  Chemically synthesized
ggcuuuucugguugagcccauuu

SEQ ID NO: 83764 - RNA, 23 nt, Artificial Sequence
  Chemically synthesized
gcuuuucugguugagcccauuuu

SEQ ID NO: 83765 - RNA, 23 nt, Artificial Sequence
  Chemically synthesized
aaaaugaauuuuccaucugacuu

SEQ ID NO: 83766 - RNA, 23 nt, Artificial Sequence
  Chemically synthesized
uaaucuuccugcccagcuguguc

SEQ ID NO: 83767 - RNA, 23 nt, Artificial Sequence
  Chemically synthesized
agacagguuaugccaucuuccaa

SEQ ID NO: 83768 - RNA, 23 nt, Artificial Sequence
  Chemically synthesized
gacagguuaugccaucuuccaaa

SEQ ID NO: 83769 - RNA, 23 nt, Artificial Sequence
  Chemically synthesized
acagguuaugccaucuuccaaag

SEQ ID NO: 83770 - RNA, 23 nt, Artificial Sequence
  Chemically synthesized
gggcugugcuugcagcaagguuu

SEQ ID NO: 83771 - RNA, 23 nt, Artificial Sequence
  Chemically synthesized
ggcugugcuugcagcaagguuuc

SEQ ID NO: 83772 - RNA, 23 nt, Artificial Sequence
  Chemically synthesized
gcugugcuugcagcaagguuuca

SEQ ID NO: 83773 - RNA, 23 nt, Artificial Sequence
  Chemically synthesized
cugugcuugcagcaagguuucac

SEQ ID NO: 83774 - RNA, 23 nt, Artificial Sequence
  Chemically synthesized
ugugcuugcagcaagguuucaca

SEQ ID NO: 83775 - RNA, 23 nt, Artificial Sequence
  Chemically synthesized
uucuucccacgucuagcuugcag

SEQ ID NO: 83776 - RNA, 23 nt, Artificial Sequence
  Chemically synthesized
ucuucccacgucuagcuugcaga

SEQ ID NO: 83777 - RNA, 23 nt, Artificial Sequence
  Chemically synthesized
aguucucaaacacugugggcaca

SEQ ID NO: 83778 - RNA, 23 nt, Artificial Sequence
  Chemically synthesized
guucucaaacacugugggcacau

SEQ ID NO: 83779 - RNA, 23 nt, Artificial Sequence
  Chemically synthesized
uucucaaacacugugggcacaua

SEQ ID NO: 83780 - RNA, 23 nt, Artificial Sequence
  Chemically synthesized
ggcgaucauaaucuuccugccca

SEQ ID NO: 83781 - RNA, 23 nt, Artificial Sequence
  Chemically synthesized
gcgaucauaaucuuccugcccag

SEQ ID NO: 83782 - RNA, 23 nt, Artificial Sequence
  Chemically synthesized
cgaucauaaucuuccugcccagc

SEQ ID NO: 83783 - RNA, 23 nt, Artificial Sequence
  Chemically synthesized
acuucugauuuguaaucuuaggu

SEQ ID NO: 83784 - RNA, 23 nt, Artificial Sequence
  Chemically synthesized
cuucugauuuguaaucuuaggua

SEQ ID NO: 83785 - RNA, 23 nt, Artificial Sequence
  Chemically synthesized
uucugauuuguaaucuuagguaa

SEQ ID NO: 83786 - RNA, 23 nt, Artificial Sequence
  Chemically synthesized
uucuagaaagaagcaagaaguua

SEQ ID NO: 83787 - RNA, 23 nt, Artificial Sequence
  Chemically synthesized
ucuagaaagaagcaagaaguuaa

SEQ ID NO: 83788 - RNA, 23 nt, Artificial Sequence
  Chemically synthesized
ggccucaggcgaucauaaucuuc

SEQ ID NO: 83789 - RNA, 23 nt, Artificial Sequence
  Chemically synthesized
gccucaggcgaucauaaucuucc

SEQ ID NO: 83790 - RNA, 23 nt, Artificial Sequence
  Chemically synthesized
ccucaggcgaucauaaucuuccu

SEQ ID NO: 83791 - RNA, 23 nt, Artificial Sequence
  Chemically synthesized
cucaggcgaucauaaucuuccug

SEQ ID NO: 83792 - RNA, 23 nt, Artificial Sequence
  Chemically synthesized
ucaggcgaucauaaucuuccugc

SEQ ID NO: 83793 - RNA, 23 nt, Artificial Sequence
  Chemically synthesized
gcugugucccacaaagccaacuc

SEQ ID NO: 83794 - RNA, 23 nt, Artificial Sequence
  Chemically synthesized
cugugucccacaaagccaacucu

SEQ ID NO: 83795 - RNA, 23 nt, Artificial Sequence
  Chemically synthesized
ugugucccacaaagccaacucua

SEQ ID NO: 83796 - RNA, 23 nt, Artificial Sequence
  Chemically synthesized
gugucccacaaagccaacucuac

SEQ ID NO: 83797 - RNA, 23 nt, Artificial Sequence
  Chemically synthesized
ugucccacaaagccaacucuacc

SEQ ID NO: 83798 - RNA, 23 nt, Artificial Sequence
  Chemically synthesized
caggcgaucauaaucuuccugcc

SEQ ID NO: 83799 - RNA, 23 nt, Artificial Sequence
  Chemically synthesized
uaucugccacauaguucucaaac

SEQ ID NO: 83800 - RNA, 23 nt, Artificial Sequence
  Chemically synthesized
aucugccacauaguucucaaaca

SEQ ID NO: 83801 - RNA, 23 nt, Artificial Sequence
  Chemically synthesized
ucugccacauaguucucaaacac

SEQ ID NO: 83802 - RNA, 23 nt, Artificial Sequence
  Chemically synthesized
cugccacauaguucucaaacacu

SEQ ID NO: 83803 - RNA, 23 nt, Artificial Sequence
  Chemically synthesized
ugccacauaguucucaaacacug

SEQ ID NO: 83804 - RNA, 23 nt, Artificial Sequence
  Chemically synthesized
uacugguagcaagaugacuucug

SEQ ID NO: 83805 - RNA, 23 nt, Artificial Sequence
  Chemically synthesized
ccacuuuucugggauguuuucua

SEQ ID NO: 83806 - RNA, 23 nt, Artificial Sequence
  Chemically synthesized
cacuuuucugggauguuuucuaa

SEQ ID NO: 83807 - RNA, 23 nt, Artificial Sequence
  Chemically synthesized
gccauugcucaggcaacgaaucc

SEQ ID NO: 83808 - RNA, 23 nt, Artificial Sequence
  Chemically synthesized
ccauugcucaggcaacgaauccg

SEQ ID NO: 83809 - RNA, 23 nt, Artificial Sequence
  Chemically synthesized
cauugcucaggcaacgaauccga

SEQ ID NO: 83810 - RNA, 23 nt, Artificial Sequence
  Chemically synthesized
auugcucaggcaacgaauccgag

SEQ ID NO: 83811 - RNA, 23 nt, Artificial Sequence
  Chemically synthesized
uugcucaggcaacgaauccgagu

SEQ ID NO: 83812 - RNA, 23 nt, Artificial Sequence
  Chemically synthesized
ucucugccuucuucagguuucac

SEQ ID NO: 83813 - RNA, 23 nt, Artificial Sequence
  Chemically synthesized
cucugccuucuucagguuucacc

SEQ ID NO: 83814 - RNA, 23 nt, Artificial Sequence
  Chemically synthesized
ucugccuucuucagguuucaccg

SEQ ID NO: 83815 - RNA, 23 nt, Artificial Sequence
  Chemically synthesized
cugccacagcugcaugaacuugg

SEQ ID NO: 83816 - RNA, 23 nt, Artificial Sequence
  Chemically synthesized
ugccacagcugcaugaacuuggg

SEQ ID NO: 83817 - RNA, 23 nt, Artificial Sequence
  Chemically synthesized
gccacagcugcaugaacuugggc

SEQ ID NO: 83818 - RNA, 23 nt, Artificial Sequence
  Chemically synthesized
gcucucguagccauuucaaaaac

SEQ ID NO: 83819 - RNA, 23 nt, Artificial Sequence
  Chemically synthesized
cucucguagccauuucaaaaacc

SEQ ID NO: 83820 - RNA, 23 nt, Artificial Sequence
  Chemically synthesized
cacugugaauuagagccagaugc

SEQ ID NO: 83821 - RNA, 23 nt, Artificial Sequence
  Chemically synthesized
acugugaauuagagccagaugcu

SEQ ID NO: 83822 - RNA, 23 nt, Artificial Sequence
  Chemically synthesized
cugugaauuagagccagaugcuu

SEQ ID NO: 83823 - RNA, 23 nt, Artificial Sequence
  Chemically synthesized
ugugaauuagagccagaugcuua

SEQ ID NO: 83824 - RNA, 23 nt, Artificial Sequence
  Chemically synthesized
gugaauuagagccagaugcuuaa

SEQ ID NO: 83825 - RNA, 23 nt, Artificial Sequence
  Chemically synthesized
gccacauaguucucaaacacugu

SEQ ID NO: 83826 - RNA, 23 nt, Artificial Sequence
  Chemically synthesized
ccacauaguucucaaacacugug

SEQ ID NO: 83827 - RNA, 23 nt, Artificial Sequence
  Chemically synthesized
uccaccucgauaucugccacaua

SEQ ID NO: 83828 - RNA, 23 nt, Artificial Sequence
  Chemically synthesized
gggcugucgauggaaaaacacau

SEQ ID NO: 83829 - RNA, 23 nt, Artificial Sequence
  Chemically synthesized
ggcugucgauggaaaaacacauc

SEQ ID NO: 83830 - RNA, 23 nt, Artificial Sequence
  Chemically synthesized
gcugucgauggaaaaacacauca

SEQ ID NO: 83831 - RNA, 23 nt, Artificial Sequence
  Chemically synthesized
cugucgauggaaaaacacaucag

SEQ ID NO: 83832 - RNA, 23 nt, Artificial Sequence
  Chemically synthesized
ugucgauggaaaaacacaucagu

SEQ ID NO: 83833 - RNA, 23 nt, Artificial Sequence
  Chemically synthesized
cccgccuugugugcucaucauuc

SEQ ID NO: 83834 - RNA, 23 nt, Artificial Sequence
  Chemically synthesized
ccgccuugugugcucaucauucc

SEQ ID NO: 83835 - RNA, 23 nt, Artificial Sequence
  Chemically synthesized
aucauaguuggcuucuaaauacu

SEQ ID NO: 83836 - RNA, 23 nt, Artificial Sequence
  Chemically synthesized
ucauaguuggcuucuaaauacug

SEQ ID NO: 83837 - RNA, 23 nt, Artificial Sequence
  Chemically synthesized
cauaguuggcuucuaaauacugg

SEQ ID NO: 83838 - RNA, 23 nt, Artificial Sequence
  Chemically synthesized
accuugcagcugacagauaauag

SEQ ID NO: 83839 - RNA, 23 nt, Artificial Sequence
  Chemically synthesized
ccuugcagcugacagauaauagg

SEQ ID NO: 83840 - RNA, 23 nt, Artificial Sequence
  Chemically synthesized
gcacugugaauuagagccagaug

SEQ ID NO: 83841 - RNA, 23 nt, Artificial Sequence
  Chemically synthesized
guaacucugccacagcugcauga

SEQ ID NO: 83842 - RNA, 23 nt, Artificial Sequence
  Chemically synthesized
uaacucugccacagcugcaugaa

SEQ ID NO: 83843 - RNA, 23 nt, Artificial Sequence
  Chemically synthesized
uaauugccucaggcgugaaacca

SEQ ID NO: 83844 - RNA, 23 nt, Artificial Sequence
  Chemically synthesized
aauugccucaggcgugaaaccaa

SEQ ID NO: 83845 - RNA, 23 nt, Artificial Sequence
  Chemically synthesized
auugccucaggcgugaaaccaau

SEQ ID NO: 83846 - RNA, 23 nt, Artificial Sequence
  Chemically synthesized
aaugaaaaaggccaguaaucaua

SEQ ID NO: 83847 - RNA, 23 nt, Artificial Sequence
  Chemically synthesized
augaaaaaggccaguaaucauac

SEQ ID NO: 83848 - RNA, 23 nt, Artificial Sequence
  Chemically synthesized
cuauaagguaacuaacaugaaac

SEQ ID NO: 83849 - RNA, 23 nt, Artificial Sequence
  Chemically synthesized
uauaagguaacuaacaugaaacc

SEQ ID NO: 83850 - RNA, 23 nt, Artificial Sequence
  Chemically synthesized
auaagguaacuaacaugaaacca

SEQ ID NO: 83851 - RNA, 23 nt, Artificial Sequence
  Chemically synthesized
uaagguaacuaacaugaaaccac

SEQ ID NO: 83852 - RNA, 23 nt, Artificial Sequence
  Chemically synthesized
aagguaacuaacaugaaaccaca

SEQ ID NO: 83853 - RNA, 23 nt, Artificial Sequence
  Chemically synthesized
gggcuguuagagcagugucaaaa

SEQ ID NO: 83854 - RNA, 23 nt, Artificial Sequence
  Chemically synthesized
ggcuguuagagcagugucaaaag

SEQ ID NO: 83855 - RNA, 23 nt, Artificial Sequence
  Chemically synthesized
ccagaguaccuugcagcugacag

SEQ ID NO: 83856 - RNA, 23 nt, Artificial Sequence
  Chemically synthesized
cagaguaccuugcagcugacaga

SEQ ID NO: 83857 - RNA, 23 nt, Artificial Sequence
  Chemically synthesized
agaguaccuugcagcugacagau

SEQ ID NO: 83858 - RNA, 23 nt, Artificial Sequence
  Chemically synthesized
gaguaccuugcagcugacagaua

SEQ ID NO: 83859 - RNA, 23 nt, Artificial Sequence
  Chemically synthesized
aguaccuugcagcugacagauaa

SEQ ID NO: 83860 - RNA, 23 nt, Artificial Sequence
  Chemically synthesized
aaaaaugaauuuuccaucugacu

SEQ ID NO: 83861 - RNA, 23 nt, Artificial Sequence
  Chemically synthesized
uuccacaggcuccaucaccaaca

SEQ ID NO: 83862 - RNA, 23 nt, Artificial Sequence
  Chemically synthesized
uccacaggcuccaucaccaacaa

SEQ ID NO: 83863 - RNA, 23 nt, Artificial Sequence
  Chemically synthesized
ccacaggcuccaucaccaacaau

SEQ ID NO: 83864 - RNA, 23 nt, Artificial Sequence
  Chemically synthesized
cacaggcuccaucaccaacaauc

SEQ ID NO: 83865 - RNA, 23 nt, Artificial Sequence
  Chemically synthesized
acaggcuccaucaccaacaauca

SEQ ID NO: 83866 - RNA, 23 nt, Artificial Sequence
  Chemically synthesized
ugaaaaaggccaguaaucauaca

SEQ ID NO: 83867 - RNA, 23 nt, Artificial Sequence
  Chemically synthesized
ccaccucgauaucugccacauag

SEQ ID NO: 83868 - RNA, 23 nt, Artificial Sequence
  Chemically synthesized
caccucgauaucugccacauagu

SEQ ID NO: 83869 - RNA, 23 nt, Artificial Sequence
  Chemically synthesized
accucgauaucugccacauaguu

SEQ ID NO: 83870 - RNA, 23 nt, Artificial Sequence
  Chemically synthesized
ccucgauaucugccacauaguuc

SEQ ID NO: 83871 - RNA, 23 nt, Artificial Sequence
  Chemically synthesized
cggcuccugcuucaucuuggcua

SEQ ID NO: 83872 - RNA, 23 nt, Artificial Sequence
  Chemically synthesized
ggcuccugcuucaucuuggcuag

SEQ ID NO: 83873 - RNA, 23 nt, Artificial Sequence
  Chemically synthesized
gcuccugcuucaucuuggcuagc

SEQ ID NO: 83874 - RNA, 23 nt, Artificial Sequence
  Chemically synthesized
caacucuaccugcuuuccaucca

SEQ ID NO: 83875 - RNA, 23 nt, Artificial Sequence
  Chemically synthesized
aacucuaccugcuuuccauccac

SEQ ID NO: 83876 - RNA, 23 nt, Artificial Sequence
  Chemically synthesized
agguaacuaacaugaaaccacag

SEQ ID NO: 83877 - RNA, 23 nt, Artificial Sequence
  Chemically synthesized
gguaacuaacaugaaaccacaga

SEQ ID NO: 83878 - RNA, 23 nt, Artificial Sequence
  Chemically synthesized
guaacuaacaugaaaccacagaa

SEQ ID NO: 83879 - RNA, 23 nt, Artificial Sequence
  Chemically synthesized
uaacuaacaugaaaccacagaac

SEQ ID NO: 83880 - RNA, 23 nt, Artificial Sequence
  Chemically synthesized
cuuuccacaggcuccaucaccaa

SEQ ID NO: 83881 - RNA, 23 nt, Artificial Sequence
  Chemically synthesized
uuuccacaggcuccaucaccaac

SEQ ID NO: 83882 - RNA, 23 nt, Artificial Sequence
  Chemically synthesized
ccaacucuaccugcuuuccaucc

SEQ ID NO: 83883 - RNA, 23 nt, Artificial Sequence
  Chemically synthesized
aaaaaaugaauuuuccaucugac

SEQ ID NO: 83884 - RNA, 23 nt, Artificial Sequence
  Chemically synthesized
acuucaaaauuaaccgcauaagg

SEQ ID NO: 83885 - RNA, 23 nt, Artificial Sequence
  Chemically synthesized
aacuaacaugaaaccacagaacu

SEQ ID NO: 83886 - RNA, 23 nt, Artificial Sequence
  Chemically synthesized
acuaacaugaaaccacagaacug

SEQ ID NO: 83887 - RNA, 23 nt, Artificial Sequence
  Chemically synthesized
cuaacaugaaaccacagaacugu

SEQ ID NO: 83888 - RNA, 23 nt, Artificial Sequence
  Chemically synthesized
uaacaugaaaccacagaacugua

SEQ ID NO: 83889 - RNA, 23 nt, Artificial Sequence
  Chemically synthesized
uaccuugcagcugacagauaaua

SEQ ID NO: 83890 - RNA, 23 nt, Artificial Sequence
  Chemically synthesized
ugggcuuuucugguugagcccau

SEQ ID NO: 83891 - RNA, 23 nt, Artificial Sequence
  Chemically synthesized
gggcuuuucugguugagcccauu

SEQ ID NO: 83892 - RNA, 23 nt, Artificial Sequence
  Chemically synthesized
ccacagaacuguaacucugccac

SEQ ID NO: 83893 - RNA, 23 nt, Artificial Sequence
  Chemically synthesized
cacagaacuguaacucugccaca

SEQ ID NO: 83894 - RNA, 23 nt, Artificial Sequence
  Chemically synthesized
acagaacuguaacucugccacag

SEQ ID NO: 83895 - RNA, 23 nt, Artificial Sequence
  Chemically synthesized
cagaacuguaacucugccacagc

SEQ ID NO: 83896 - RNA, 23 nt, Artificial Sequence
  Chemically synthesized
agaacuguaacucugccacagcu

SEQ ID NO: 83897 - RNA, 23 nt, Artificial Sequence
  Chemically synthesized
aggcgaucauaaucuuccugccc

SEQ ID NO: 83898 - RNA, 23 nt, Artificial Sequence
  Chemically synthesized
gccaacucuaccugcuuuccauc

SEQ ID NO: 83899 - RNA, 23 nt, Artificial Sequence
  Chemically synthesized
gcuugcagagcagcucucguagc

SEQ ID NO: 83900 - RNA, 23 nt, Artificial Sequence
  Chemically synthesized
cuugcagagcagcucucguagcc

SEQ ID NO: 83901 - RNA, 23 nt, Artificial Sequence
  Chemically synthesized
uugcagagcagcucucguagcca

SEQ ID NO: 83902 - RNA, 23 nt, Artificial Sequence
  Chemically synthesized
aaaaacacaucaguauaacaucg

SEQ ID NO: 83903 - RNA, 23 nt, Artificial Sequence
  Chemically synthesized
aaaacacaucaguauaacaucgg

SEQ ID NO: 83904 - RNA, 23 nt, Artificial Sequence
  Chemically synthesized
aaacacaucaguauaacaucggu

SEQ ID NO: 83905 - RNA, 23 nt, Artificial Sequence
  Chemically synthesized
aacacaucaguauaacaucggua

SEQ ID NO: 83906 - RNA, 23 nt, Artificial Sequence
  Chemically synthesized
acacaucaguauaacaucgguau

SEQ ID NO: 83907 - RNA, 23 nt, Artificial Sequence
  Chemically synthesized
accugcuuuccauccaccucgau

SEQ ID NO: 83908 - RNA, 23 nt, Artificial Sequence
  Chemically synthesized
ggugacucaccagaguaccuugc

SEQ ID NO: 83909 - RNA, 23 nt, Artificial Sequence
  Chemically synthesized
gugacucaccagaguaccuugca

SEQ ID NO: 83910 - RNA, 23 nt, Artificial Sequence
  Chemically synthesized
ugacucaccagaguaccuugcag

SEQ ID NO: 83911 - RNA, 23 nt, Artificial Sequence
  Chemically synthesized
gucccacaaagccaacucuaccu

SEQ ID NO: 83912 - RNA, 23 nt, Artificial Sequence
  Chemically synthesized
ucccacaaagccaacucuaccug

SEQ ID NO: 83913 - RNA, 23 nt, Artificial Sequence
  Chemically synthesized
augaaaccacagaacuguaacuc

SEQ ID NO: 83914 - RNA, 23 nt, Artificial Sequence
  Chemically synthesized
ugaaaccacagaacuguaacucu

SEQ ID NO: 83915 - RNA, 23 nt, Artificial Sequence
  Chemically synthesized
gaaaccacagaacuguaacucug

SEQ ID NO: 83916 - RNA, 23 nt, Artificial Sequence
  Chemically synthesized
ugcucaggcaacgaauccgaguc

SEQ ID NO: 83917 - RNA, 23 nt, Artificial Sequence
  Chemically synthesized
gcucaggcaacgaauccgagucc

SEQ ID NO: 83918 - RNA, 23 nt, Artificial Sequence
  Chemically synthesized
cucaggcaacgaauccgagucca

SEQ ID NO: 83919 - RNA, 23 nt, Artificial Sequence
  Chemically synthesized
ucaggcaacgaauccgaguccag

SEQ ID NO: 83920 - RNA, 23 nt, Artificial Sequence
  Chemically synthesized
gacucaccagaguaccuugcagc

SEQ ID NO: 83921 - RNA, 23 nt, Artificial Sequence
  Chemically synthesized
acucaccagaguaccuugcagcu

SEQ ID NO: 83922 - RNA, 23 nt, Artificial Sequence
  Chemically synthesized
cucaccagaguaccuugcagcug

SEQ ID NO: 83923 - RNA, 23 nt, Artificial Sequence
  Chemically synthesized
ucaccagaguaccuugcagcuga

SEQ ID NO: 83924 - RNA, 23 nt, Artificial Sequence
  Chemically synthesized
cagaaaugcuugacuucuggggu

SEQ ID NO: 83925 - RNA, 23 nt, Artificial Sequence
  Chemically synthesized
agaaaugcuugacuucugggguc

SEQ ID NO: 83926 - RNA, 23 nt, Artificial Sequence
  Chemically synthesized
cccacaaagccaacucuaccugc

SEQ ID NO: 83927 - RNA, 23 nt, Artificial Sequence
  Chemically synthesized
ccacaaagccaacucuaccugcu

SEQ ID NO: 83928 - RNA, 23 nt, Artificial Sequence
  Chemically synthesized
ucuucagguuucaccggcuccug

SEQ ID NO: 83929 - RNA, 23 nt, Artificial Sequence
  Chemically synthesized
ccugcuuuccauccaccucgaua

SEQ ID NO: 83930 - RNA, 23 nt, Artificial Sequence
  Chemically synthesized
uuuaucagaaaaagugacaaaac

SEQ ID NO: 83931 - RNA, 23 nt, Artificial Sequence
  Chemically synthesized
ugcuugcagcaagguuucacaag

SEQ ID NO: 83932 - RNA, 23 nt, Artificial Sequence
  Chemically synthesized
gcuugcagcaagguuucacaaga

SEQ ID NO: 83933 - RNA, 23 nt, Artificial Sequence
  Chemically synthesized
cacaucaguauaacaucgguauc

SEQ ID NO: 83934 - RNA, 23 nt, Artificial Sequence
  Chemically synthesized
acaucaguauaacaucgguaucu

SEQ ID NO: 83935 - RNA, 23 nt, Artificial Sequence
  Chemically synthesized
caucaguauaacaucgguaucug

SEQ ID NO: 83936 - RNA, 23 nt, Artificial Sequence
  Chemically synthesized
aucaguauaacaucgguaucugg

SEQ ID NO: 83937 - RNA, 23 nt, Artificial Sequence
  Chemically synthesized
ugccaucuuccaaagugucuaau

SEQ ID NO: 83938 - RNA, 23 nt, Artificial Sequence
  Chemically synthesized
gaagcaagaaguuaagaaauucc

SEQ ID NO: 83939 - RNA, 23 nt, Artificial Sequence
  Chemically synthesized
aagcaagaaguuaagaaauuccu

SEQ ID NO: 83940 - RNA, 23 nt, Artificial Sequence
  Chemically synthesized
agcaagaaguuaagaaauuccuu

SEQ ID NO: 83941 - RNA, 23 nt, Artificial Sequence
  Chemically synthesized
gcaagaaguuaagaaauuccuug

SEQ ID NO: 83942 - RNA, 23 nt, Artificial Sequence
  Chemically synthesized
caagaaguuaagaaauuccuuga

SEQ ID NO: 83943 - RNA, 23 nt, Artificial Sequence
  Chemically synthesized
gagcaagcaugucuuuccacagg

SEQ ID NO: 83944 - RNA, 23 nt, Artificial Sequence
  Chemically synthesized
agcaagcaugucuuuccacaggc

SEQ ID NO: 83945 - RNA, 23 nt, Artificial Sequence
  Chemically synthesized
gcaagcaugucuuuccacaggcu

SEQ ID NO: 83946 - RNA, 23 nt, Artificial Sequence
  Chemically synthesized
caagcaugucuuuccacaggcuc

SEQ ID NO: 83947 - RNA, 23 nt, Artificial Sequence
  Chemically synthesized
ugaauuagcgccuggugugucag

SEQ ID NO: 83948 - RNA, 23 nt, Artificial Sequence
  Chemically synthesized
gaauuagcgccuggugugucagg

SEQ ID NO: 83949 - RNA, 23 nt, Artificial Sequence
  Chemically synthesized
aauuagcgccuggugugucaggu

SEQ ID NO: 83950 - RNA, 23 nt, Artificial Sequence
  Chemically synthesized
auuagcgccuggugugucaggug

SEQ ID NO: 83951 - RNA, 23 nt, Artificial Sequence
  Chemically synthesized
aagaaguuaagaaauuccuugaa

SEQ ID NO: 83952 - RNA, 23 nt, Artificial Sequence
  Chemically synthesized
agaaguuaagaaauuccuugaau

SEQ ID NO: 83953 - RNA, 23 nt, Artificial Sequence
  Chemically synthesized
gaaguuaagaaauuccuugaauu

SEQ ID NO: 83954 - RNA, 23 nt, Artificial Sequence
  Chemically synthesized
aacaucgguaucuggguaggaga

SEQ ID NO: 83955 - RNA, 23 nt, Artificial Sequence
  Chemically synthesized
acaucgguaucuggguaggagag

SEQ ID NO: 83956 - RNA, 23 nt, Artificial Sequence
  Chemically synthesized
caucgguaucuggguaggagagg

SEQ ID NO: 83957 - RNA, 23 nt, Artificial Sequence
  Chemically synthesized
aucgguaucuggguaggagaggg

SEQ ID NO: 83958 - RNA, 23 nt, Artificial Sequence
  Chemically synthesized
ucgguaucuggguaggagagggg

SEQ ID NO: 83959 - RNA, 23 nt, Artificial Sequence
  Chemically synthesized
cagguuaugccaucuuccaaagu

SEQ ID NO: 83960 - RNA, 23 nt, Artificial Sequence
  Chemically synthesized
gagcacugugaauuagagccaga

SEQ ID NO: 83961 - RNA, 23 nt, Artificial Sequence
  Chemically synthesized
agcacugugaauuagagccagau

SEQ ID NO: 83962 - RNA, 23 nt, Artificial Sequence
  Chemically synthesized
uccaucuuuggucuuugcugaac

SEQ ID NO: 83963 - RNA, 23 nt, Artificial Sequence
  Chemically synthesized
gucgauggaaaaacacaucagua

SEQ ID NO: 83964 - RNA, 23 nt, Artificial Sequence
  Chemically synthesized
ucgauggaaaaacacaucaguau

SEQ ID NO: 83965 - RNA, 23 nt, Artificial Sequence
  Chemically synthesized
cgauggaaaaacacaucaguaua

SEQ ID NO: 83966 - RNA, 23 nt, Artificial Sequence
  Chemically synthesized
gauggaaaaacacaucaguauaa

SEQ ID NO: 83967 - RNA, 23 nt, Artificial Sequence
  Chemically synthesized
auggaaaaacacaucaguauaac

SEQ ID NO: 83968 - RNA, 23 nt, Artificial Sequence
  Chemically synthesized
auaacaucgguaucuggguagga

SEQ ID NO: 83969 - RNA, 23 nt, Artificial Sequence
  Chemically synthesized
uacaccucugggaacugguccuu

SEQ ID NO: 83970 - RNA, 23 nt, Artificial Sequence
  Chemically synthesized
cacaagacaaggcacccagauuu

SEQ ID NO: 83971 - RNA, 23 nt, Artificial Sequence
  Chemically synthesized
acaagacaaggcacccagauuuu

SEQ ID NO: 83972 - RNA, 23 nt, Artificial Sequence
  Chemically synthesized
caagacaaggcacccagauuuuu

SEQ ID NO: 83973 - RNA, 23 nt, Artificial Sequence
  Chemically synthesized
aagacaaggcacccagauuuuuu

SEQ ID NO: 83974 - RNA, 23 nt, Artificial Sequence
  Chemically synthesized
acucugccacagcugcaugaacu

SEQ ID NO: 83975 - RNA, 23 nt, Artificial Sequence
  Chemically synthesized
cucugccacagcugcaugaacuu

SEQ ID NO: 83976 - RNA, 23 nt, Artificial Sequence
  Chemically synthesized
ucugccacagcugcaugaacuug

SEQ ID NO: 83977 - RNA, 23 nt, Artificial Sequence
  Chemically synthesized
uuagucagcuggagagaagagag

SEQ ID NO: 83978 - RNA, 23 nt, Artificial Sequence
  Chemically synthesized
uagucagcuggagagaagagaga

SEQ ID NO: 83979 - RNA, 23 nt, Artificial Sequence
  Chemically synthesized
agucagcuggagagaagagagac

SEQ ID NO: 83980 - RNA, 23 nt, Artificial Sequence
  Chemically synthesized
gucagcuggagagaagagagacu

SEQ ID NO: 83981 - RNA, 23 nt, Artificial Sequence
  Chemically synthesized
aguuuagucagcuggagagaaga

SEQ ID NO: 83982 - RNA, 23 nt, Artificial Sequence
  Chemically synthesized
guuuagucagcuggagagaagag

SEQ ID NO: 83983 - RNA, 23 nt, Artificial Sequence
  Chemically synthesized
uuuagucagcuggagagaagaga

SEQ ID NO: 83984 - RNA, 23 nt, Artificial Sequence
  Chemically synthesized
gaaaaacacaucaguauaacauc

SEQ ID NO: 83985 - RNA, 23 nt, Artificial Sequence
  Chemically synthesized
gccaucuuccaaagugucuaauu

SEQ ID NO: 83986 - RNA, 23 nt, Artificial Sequence
  Chemically synthesized
ccaguuucuuccggauggcagcc

SEQ ID NO: 83987 - RNA, 23 nt, Artificial Sequence
  Chemically synthesized
caguuucuuccggauggcagcca

SEQ ID NO: 83988 - RNA, 23 nt, Artificial Sequence
  Chemically synthesized
aguuucuuccggauggcagccau

SEQ ID NO: 83989 - RNA, 23 nt, Artificial Sequence
  Chemically synthesized
gugcuugcagcaagguuucacaa

SEQ ID NO: 83990 - RNA, 23 nt, Artificial Sequence
  Chemically synthesized
cacaaagccaacucuaccugcuu

SEQ ID NO: 83991 - RNA, 23 nt, Artificial Sequence
  Chemically synthesized
ugaauuagagccagaugcuuaag

SEQ ID NO: 83992 - RNA, 23 nt, Artificial Sequence
  Chemically synthesized
cugccuucuucagguuucaccgg

SEQ ID NO: 83993 - RNA, 23 nt, Artificial Sequence
  Chemically synthesized
aacaugaaaccacagaacuguaa

SEQ ID NO: 83994 - RNA, 23 nt, Artificial Sequence
  Chemically synthesized
acaugaaaccacagaacuguaac

SEQ ID NO: 83995 - RNA, 23 nt, Artificial Sequence
  Chemically synthesized
guaccuugcagcugacagauaau

SEQ ID NO: 83996 - RNA, 23 nt, Artificial Sequence
  Chemically synthesized
cuagaaagaagcaagaaguuaag

SEQ ID NO: 83997 - RNA, 23 nt, Artificial Sequence
  Chemically synthesized
aaucuuccugcccagcugugucc

SEQ ID NO: 83998 - RNA, 23 nt, Artificial Sequence
  Chemically synthesized
gugugcucaucauuccgaagauc

SEQ ID NO: 83999 - RNA, 23 nt, Artificial Sequence
  Chemically synthesized
ggggccucaggcgaucauaaucu

SEQ ID NO: 84000 - RNA, 23 nt, Artificial Sequence
  Chemically synthesized
gggccucaggcgaucauaaucuu

SEQ ID NO: 84001 - RNA, 23 nt, Artificial Sequence
  Chemically synthesized
gugucaaaaggacccuggugggc

SEQ ID NO: 84002 - RNA, 23 nt, Artificial Sequence
  Chemically synthesized
ugucaaaaggacccuggugggcc

SEQ ID NO: 84003 - RNA, 23 nt, Artificial Sequence
  Chemically synthesized
aggagaaaagagcacugugaauu

SEQ ID NO: 84004 - RNA, 23 nt, Artificial Sequence
  Chemically synthesized
aaagugacaaaacgggaauuuaa

SEQ ID NO: 84005 - RNA, 23 nt, Artificial Sequence
  Chemically synthesized
aagugacaaaacgggaauuuaaa

SEQ ID NO: 84006 - RNA, 23 nt, Artificial Sequence
  Chemically synthesized
agugacaaaacgggaauuuaaaa

SEQ ID NO: 84007 - RNA, 23 nt, Artificial Sequence
  Chemically synthesized
gugacaaaacgggaauuuaaaaa

SEQ ID NO: 84008 - RNA, 23 nt, Artificial Sequence
  Chemically synthesized
ugacaaaacgggaauuuaaaaaa

SEQ ID NO: 84009 - RNA, 23 nt, Artificial Sequence
  Chemically synthesized
ggaguaaagcccugaagugguga

SEQ ID NO: 84010 - RNA, 23 nt, Artificial Sequence
  Chemically synthesized
gaguaaagcccugaaguggugac

SEQ ID NO: 84011 - RNA, 23 nt, Artificial Sequence
  Chemically synthesized
aguaaagcccugaaguggugacu

SEQ ID NO: 84012 - RNA, 23 nt, Artificial Sequence
  Chemically synthesized
guaaagcccugaaguggugacuc

SEQ ID NO: 84013 - RNA, 23 nt, Artificial Sequence
  Chemically synthesized
uaaagcccugaaguggugacuca

SEQ ID NO: 84014 - RNA, 23 nt, Artificial Sequence
  Chemically synthesized
uggaaaaacacaucaguauaaca

SEQ ID NO: 84015 - RNA, 23 nt, Artificial Sequence
  Chemically synthesized
agccauugcucaggcaacgaauc

SEQ ID NO: 84016 - RNA, 23 nt, Artificial Sequence
  Chemically synthesized
aaagccaacucuaccugcuuucc

SEQ ID NO: 84017 - RNA, 23 nt, Artificial Sequence
  Chemically synthesized
guccacuuuucugggauguuuuc

SEQ ID NO: 84018 - RNA, 23 nt, Artificial Sequence
  Chemically synthesized
uccacuuuucugggauguuuucu

SEQ ID NO: 84019 - RNA, 23 nt, Artificial Sequence
  Chemically synthesized
gcccugaaguggugacucaccag

SEQ ID NO: 84020 - RNA, 23 nt, Artificial Sequence
  Chemically synthesized
cccugaaguggugacucaccaga

SEQ ID NO: 84021 - RNA, 23 nt, Artificial Sequence
  Chemically synthesized
cuucccacgucuagcuugcagag

SEQ ID NO: 84022 - RNA, 23 nt, Artificial Sequence
  Chemically synthesized
uucccacgucuagcuugcagagc

SEQ ID NO: 84023 - RNA, 23 nt, Artificial Sequence
  Chemically synthesized
uaacaucgguaucuggguaggag

SEQ ID NO: 84024 - RNA, 23 nt, Artificial Sequence
  Chemically synthesized
acccaugagaacugguggcuccu

SEQ ID NO: 84025 - RNA, 23 nt, Artificial Sequence
  Chemically synthesized
cccaugagaacugguggcuccuc

SEQ ID NO: 84026 - RNA, 23 nt, Artificial Sequence
  Chemically synthesized
ccaugagaacugguggcuccucu

SEQ ID NO: 84027 - RNA, 23 nt, Artificial Sequence
  Chemically synthesized
caugagaacugguggcuccucug

SEQ ID NO: 84028 - RNA, 23 nt, Artificial Sequence
  Chemically synthesized
augagaacugguggcuccucugg

SEQ ID NO: 84029 - RNA, 23 nt, Artificial Sequence
  Chemically synthesized
gaccagaccguggacuaacgaga

SEQ ID NO: 84030 - RNA, 23 nt, Artificial Sequence
  Chemically synthesized
accagaccguggacuaacgagag

SEQ ID NO: 84031 - RNA, 23 nt, Artificial Sequence
  Chemically synthesized
ccagaccguggacuaacgagaga

SEQ ID NO: 84032 - RNA, 23 nt, Artificial Sequence
  Chemically synthesized
cagaccguggacuaacgagagaa

SEQ ID NO: 84033 - RNA, 23 nt, Artificial Sequence
  Chemically synthesized
agaccguggacuaacgagagaac

SEQ ID NO: 84034 - RNA, 23 nt, Artificial Sequence
  Chemically synthesized
agccaacucuaccugcuuuccau

SEQ ID NO: 84035 - RNA, 23 nt, Artificial Sequence
  Chemically synthesized
ccaucuuuggucuuugcugaaca

SEQ ID NO: 84036 - RNA, 23 nt, Artificial Sequence
  Chemically synthesized
acugagugccacccaugagaacu

SEQ ID NO: 84037 - RNA, 23 nt, Artificial Sequence
  Chemically synthesized
cugagugccacccaugagaacug

SEQ ID NO: 84038 - RNA, 23 nt, Artificial Sequence
  Chemically synthesized
gagugccacccaugagaacuggu

SEQ ID NO: 84039 - RNA, 23 nt, Artificial Sequence
  Chemically synthesized
agugccacccaugagaacuggug

SEQ ID NO: 84040 - RNA, 23 nt, Artificial Sequence
  Chemically synthesized
cuggauacagugaggagaaaaga

SEQ ID NO: 84041 - RNA, 23 nt, Artificial Sequence
  Chemically synthesized
uacggaguaaagcccugaagugg

SEQ ID NO: 84042 - RNA, 23 nt, Artificial Sequence
  Chemically synthesized
uggccaucuuuuaucagaaaaag

SEQ ID NO: 84043 - RNA, 23 nt, Artificial Sequence
  Chemically synthesized
uaguaguuggaaaaauuaacugg

SEQ ID NO: 84044 - RNA, 23 nt, Artificial Sequence
  Chemically synthesized
gaccguggacuaacgagagaacc

SEQ ID NO: 84045 - RNA, 23 nt, Artificial Sequence
  Chemically synthesized
caccagaguaccuugcagcugac

SEQ ID NO: 84046 - RNA, 23 nt, Artificial Sequence
  Chemically synthesized
accagaguaccuugcagcugaca

SEQ ID NO: 84047 - RNA, 23 nt, Artificial Sequence
  Chemically synthesized
gcugcaugaacuugggcuuuucu

SEQ ID NO: 84048 - RNA, 23 nt, Artificial Sequence
  Chemically synthesized
caugaaaccacagaacuguaacu

SEQ ID NO: 84049 - RNA, 23 nt, Artificial Sequence
  Chemically synthesized
aagccaacucuaccugcuuucca

SEQ ID NO: 84050 - RNA, 23 nt, Artificial Sequence
  Chemically synthesized
agggcugucgauggaaaaacaca

SEQ ID NO: 84051 - RNA, 19 nt, Artificial Sequence
  Chemically synthesized
ccacaacuaauuucaccca

SEQ ID NO: 84052 - RNA, 19 nt, Artificial Sequence
  Chemically synthesized
cauggaugcuggcaucuua

SEQ ID NO: 84053 - RNA, 19 nt, Artificial Sequence
  Chemically synthesized
gagacagcucagcacugaa

SEQ ID NO: 84054 - RNA, 19 nt, Artificial Sequence
  Chemically synthesized
agucuaacaccacaacuaa

SEQ ID NO: 84055 - RNA, 19 nt, Artificial Sequence
  Chemically synthesized
caucaaucggaacucaagu

SEQ ID NO: 84056 - RNA, 19 nt, Artificial Sequence
  Chemically synthesized
guguaaggaugcaguggga

SEQ ID NO: 84057 - RNA, 19 nt, Artificial Sequence
  Chemically synthesized
cggugaguguaaggaugca

SEQ ID NO: 84058 - RNA, 19 nt, Artificial Sequence
  Chemically synthesized
uggagaucagcguggugaa

SEQ ID NO: 84059 - RNA, 19 nt, Artificial Sequence
  Chemically synthesized
cauugagacugaguugaca

SEQ ID NO: 84060 - RNA, 19 nt, Artificial Sequence
  Chemically synthesized
caucguccucacagucuua

SEQ ID NO: 84061 - RNA, 19 nt, Artificial Sequence
  Chemically synthesized
ucaucaaucggaacucaag

SEQ ID NO: 84062 - RNA, 19 nt, Artificial Sequence
  Chemically synthesized
gaugugccagauacccaaa

SEQ ID NO: 84063 - RNA, 19 nt, Artificial Sequence
  Chemically synthesized
cuauuuugagggcagugga

SEQ ID NO: 84064 - RNA, 19 nt, Artificial Sequence
  Chemically synthesized
ccuauuucuggcugccuca

SEQ ID NO: 84065 - RNA, 19 nt, Artificial Sequence
  Chemically synthesized
gagauugaagaaauccgaa

SEQ ID NO: 84066 - RNA, 19 nt, Artificial Sequence
  Chemically synthesized
guccuugaacaauuugugc

SEQ ID NO: 84067 - RNA, 19 nt, Artificial Sequence
  Chemically synthesized
ccaauaccuauguaugcaa

SEQ ID NO: 84068 - RNA, 19 nt, Artificial Sequence
  Chemically synthesized
acaucacacgggcaucaca

SEQ ID NO: 84069 - RNA, 19 nt, Artificial Sequence
  Chemically synthesized
gucuaacaccacaacuaau

SEQ ID NO: 84070 - RNA, 19 nt, Artificial Sequence
  Chemically synthesized
cugauuucccaccucccaa

SEQ ID NO: 84071 - RNA, 19 nt, Artificial Sequence
  Chemically synthesized
gcaugaccaagaaugugga

SEQ ID NO: 84072 - RNA, 19 nt, Artificial Sequence
  Chemically synthesized
ccauggcaagccauuuaca

SEQ ID NO: 84073 - RNA, 19 nt, Artificial Sequence
  Chemically synthesized
agaagguaacgucauucca

SEQ ID NO: 84074 - RNA, 19 nt, Artificial Sequence
  Chemically synthesized
uggcaagaagguaacguca

SEQ ID NO: 84075 - RNA, 19 nt, Artificial Sequence
  Chemically synthesized
gagguuuggcaagaaggua

SEQ ID NO: 84076 - RNA, 19 nt, Artificial Sequence
  Chemically synthesized
cacgcagcucugugucaaa

SEQ ID NO: 84077 - RNA, 19 nt, Artificial Sequence
  Chemically synthesized
caugaccaagaauguggaa

SEQ ID NO: 84078 - RNA, 19 nt, Artificial Sequence
  Chemically synthesized
cagacggugcaacaguuca

SEQ ID NO: 84079 - RNA, 19 nt, Artificial Sequence
  Chemically synthesized
ggcuguucuccaagaagga

SEQ ID NO: 84080 - RNA, 19 nt, Artificial Sequence
  Chemically synthesized
aacaaaucucagaagacaa

SEQ ID NO: 84081 - RNA, 19 nt, Artificial Sequence
  Chemically synthesized
gugucucagccuggagaaa

SEQ ID NO: 84082 - RNA, 19 nt, Artificial Sequence
  Chemically synthesized
gauuugaugggugguacaa

SEQ ID NO: 84083 - RNA, 19 nt, Artificial Sequence
  Chemically synthesized
gguucugaaccggagucua

SEQ ID NO: 84084 - RNA, 19 nt, Artificial Sequence
  Chemically synthesized
guuugaggugucaguguua

SEQ ID NO: 84085 - RNA, 19 nt, Artificial Sequence
  Chemically synthesized
ccuacaucagccaggauau

SEQ ID NO: 84086 - RNA, 19 nt, Artificial Sequence
  Chemically synthesized
guuugagaacaccaggaau

SEQ ID NO: 84087 - RNA, 19 nt, Artificial Sequence
  Chemically synthesized
aacccucccuacucccaua

SEQ ID NO: 84088 - RNA, 19 nt, Artificial Sequence
  Chemically synthesized
ggaugcuggcaucuuagaa

SEQ ID NO: 84089 - RNA, 19 nt, Artificial Sequence
  Chemically synthesized
caaccucauggagcacaga

SEQ ID NO: 84090 - RNA, 19 nt, Artificial Sequence
  Chemically synthesized
uuugaugggugguacaaca

SEQ ID NO: 84091 - RNA, 19 nt, Artificial Sequence
  Chemically synthesized
aaguguucuguaagaagau

SEQ ID NO: 84092 - RNA, 19 nt, Artificial Sequence
  Chemically synthesized
cagaugugccagauaccca

SEQ ID NO: 84093 - RNA, 19 nt, Artificial Sequence
  Chemically synthesized
guagcuuugcccugaucca

SEQ ID NO: 84094 - RNA, 19 nt, Artificial Sequence
  Chemically synthesized
gaagcuuuggaauggcaag

SEQ ID NO: 84095 - RNA, 19 nt, Artificial Sequence
  Chemically synthesized
cuuuugccuccauccucaa

SEQ ID NO: 84096 - RNA, 19 nt, Artificial Sequence
  Chemically synthesized
cccagggcuuugaguacaa

SEQ ID NO: 84097 - RNA, 19 nt, Artificial Sequence
  Chemically synthesized
gggaauggccucauuucca

SEQ ID NO: 84098 - RNA, 19 nt, Artificial Sequence
  Chemically synthesized
caggauaccggccauuucu

SEQ ID NO: 84099 - RNA, 19 nt, Artificial Sequence
  Chemically synthesized
agaacaucgcuguguauga

SEQ ID NO: 84100 - RNA, 19 nt, Artificial Sequence
  Chemically synthesized
guucugaaccggagucuau

SEQ ID NO: 84101 - RNA, 19 nt, Artificial Sequence
  Chemically synthesized
ucaugaaaggcucuccuga

SEQ ID NO: 84102 - RNA, 19 nt, Artificial Sequence
  Chemically synthesized
cuuugucuggcauaaagga

SEQ ID NO: 84103 - RNA, 19 nt, Artificial Sequence
  Chemically synthesized
ugaaguuuucccgcacaga

SEQ ID NO: 84104 - RNA, 19 nt, Artificial Sequence
  Chemically synthesized
ucugguuccgcuaccacaa

SEQ ID NO: 84105 - RNA, 19 nt, Artificial Sequence
  Chemically synthesized
cagucuaacaccacaacua

SEQ ID NO: 84106 - RNA, 19 nt, Artificial Sequence
  Chemically synthesized
agccauuuacagaaaccca

SEQ ID NO: 84107 - RNA, 19 nt, Artificial Sequence
  Chemically synthesized
cagaagguucugaaccgga

SEQ ID NO: 84108 - RNA, 19 nt, Artificial Sequence
  Chemically synthesized
aauuugugcggcuacggga

SEQ ID NO: 84109 - RNA, 19 nt, Artificial Sequence
  Chemically synthesized
caaucggaacucaaguguc

SEQ ID NO: 84110 - RNA, 19 nt, Artificial Sequence
  Chemically synthesized
uaauuucacccaagguuuu

SEQ ID NO: 84111 - RNA, 19 nt, Artificial Sequence
  Chemically synthesized
acaccacaacuaauuucac

SEQ ID NO: 84112 - RNA, 19 nt, Artificial Sequence
  Chemically synthesized
gaagguucugaaccggagu

SEQ ID NO: 84113 - RNA, 19 nt, Artificial Sequence
  Chemically synthesized
caugguagcuuugcccuga

SEQ ID NO: 84114 - RNA, 19 nt, Artificial Sequence
  Chemically synthesized
uggagagggccuacuacua

SEQ ID NO: 84115 - RNA, 19 nt, Artificial Sequence
  Chemically synthesized
gugcuuucagaccugguga

SEQ ID NO: 84116 - RNA, 19 nt, Artificial Sequence
  Chemically synthesized
aguagucucccuuccaaau

SEQ ID NO: 84117 - RNA, 19 nt, Artificial Sequence
  Chemically synthesized
ccuuagcaacaccaucuca

SEQ ID NO: 84118 - RNA, 19 nt, Artificial Sequence
  Chemically synthesized
gcugaccugacaaguacua

SEQ ID NO: 84119 - RNA, 19 nt, Artificial Sequence
  Chemically synthesized
cugcuuccagacuucagaa

SEQ ID NO: 84120 - RNA, 19 nt, Artificial Sequence
  Chemically synthesized
uggucccagcaaucaucua

SEQ ID NO: 84121 - RNA, 19 nt, Artificial Sequence
  Chemically synthesized
gaagguaacgucauuccag

SEQ ID NO: 84122 - RNA, 19 nt, Artificial Sequence
  Chemically synthesized
aggaugaguucaucaggau

SEQ ID NO: 84123 - RNA, 19 nt, Artificial Sequence
  Chemically synthesized
aaggaugaguucaucagga

SEQ ID NO: 84124 - RNA, 19 nt, Artificial Sequence
  Chemically synthesized
ccauguucucucuggcuga

SEQ ID NO: 84125 - RNA, 19 nt, Artificial Sequence
  Chemically synthesized
gaaauaccacccugcagga

SEQ ID NO: 84126 - RNA, 19 nt, Artificial Sequence
  Chemically synthesized
ucaucgccaccuaccagaa

SEQ ID NO: 84127 - RNA, 19 nt, Artificial Sequence
  Chemically synthesized
cuauguaugcaaugcuccu

SEQ ID NO: 84128 - RNA, 19 nt, Artificial Sequence
  Chemically synthesized
aacaccacaacuaauuuca

SEQ ID NO: 84129 - RNA, 19 nt, Artificial Sequence
  Chemically synthesized
ccuuugagcccuucuucaa

SEQ ID NO: 84130 - RNA, 19 nt, Artificial Sequence
  Chemically synthesized
uguacaucugugagcggca

SEQ ID NO: 84131 - RNA, 19 nt, Artificial Sequence
  Chemically synthesized
gugucugugcacaucuaca

SEQ ID NO: 84132 - RNA, 19 nt, Artificial Sequence
  Chemically synthesized
gacaaggaggaacugacau

SEQ ID NO: 84133 - RNA, 19 nt, Artificial Sequence
  Chemically synthesized
aaggcucuccugaggaaaa

SEQ ID NO: 84134 - RNA, 19 nt, Artificial Sequence
  Chemically synthesized
ccuugaacaauuugugcgg

SEQ ID NO: 84135 - RNA, 19 nt, Artificial Sequence
  Chemically synthesized
cucuguucagcaccaucgu

SEQ ID NO: 84136 - RNA, 19 nt, Artificial Sequence
  Chemically synthesized
aguuuucccgcacagacca

SEQ ID NO: 84137 - RNA, 19 nt, Artificial Sequence
  Chemically synthesized
aagugcugaagauguggau

SEQ ID NO: 84138 - RNA, 19 nt, Artificial Sequence
  Chemically synthesized
aagccuacaaagugcugaa

SEQ ID NO: 84139 - RNA, 19 nt, Artificial Sequence
  Chemically synthesized
gugaguguaaggaugcagu

SEQ ID NO: 84140 - RNA, 19 nt, Artificial Sequence
  Chemically synthesized
caaguacuaugugugugca

SEQ ID NO: 84141 - RNA, 19 nt, Artificial Sequence
  Chemically synthesized
ggugucaguguuaguggga

SEQ ID NO: 84142 - RNA, 19 nt, Artificial Sequence
  Chemically synthesized
uccugauccuggccaucau

SEQ ID NO: 84143 - RNA, 19 nt, Artificial Sequence
  Chemically synthesized
ucguccucacagucuuaca

SEQ ID NO: 84144 - RNA, 19 nt, Artificial Sequence
  Chemically synthesized
agcccuugcuguucacuga

SEQ ID NO: 84145 - RNA, 19 nt, Artificial Sequence
  Chemically synthesized
gaaaagucucgccuuaugu

SEQ ID NO: 84146 - RNA, 19 nt, Artificial Sequence
  Chemically synthesized
caaggauggcaauggcuac

SEQ ID NO: 84147 - RNA, 19 nt, Artificial Sequence
  Chemically synthesized
ccuuuuucaggcaccuuuu

SEQ ID NO: 84148 - RNA, 19 nt, Artificial Sequence
  Chemically synthesized
augccuugcaggagguaga

SEQ ID NO: 84149 - RNA, 19 nt, Artificial Sequence
  Chemically synthesized
cuuguuccagguggccaua

SEQ ID NO: 84150 - RNA, 19 nt, Artificial Sequence
  Chemically synthesized
acaucauccgagaggugga

SEQ ID NO: 84151 - RNA, 19 nt, Artificial Sequence
  Chemically synthesized
uggcugacaucauccgaga

SEQ ID NO: 84152 - RNA, 19 nt, Artificial Sequence
  Chemically synthesized
gccagauacccaaagcugu

SEQ ID NO: 84153 - RNA, 19 nt, Artificial Sequence
  Chemically synthesized
cuuccaugaugaugggucu

SEQ ID NO: 84154 - RNA, 19 nt, Artificial Sequence
  Chemically synthesized
aguucaagcgcuucauuga

SEQ ID NO: 84155 - RNA, 19 nt, Artificial Sequence
  Chemically synthesized
acaaggauggcaauggcua

SEQ ID NO: 84156 - RNA, 19 nt, Artificial Sequence
  Chemically synthesized
uauuuugagggcaguggau

SEQ ID NO: 84157 - RNA, 19 nt, Artificial Sequence
  Chemically synthesized
aacuaauuucacccaaggu

SEQ ID NO: 84158 - RNA, 19 nt, Artificial Sequence
  Chemically synthesized
ccugacaaguacuaugugu

SEQ ID NO: 84159 - RNA, 19 nt, Artificial Sequence
  Chemically synthesized
agcugaccugacaaguacu

SEQ ID NO: 84160 - RNA, 19 nt, Artificial Sequence
  Chemically synthesized
caccauuaugagaacuucu

SEQ ID NO: 84161 - RNA, 19 nt, Artificial Sequence
  Chemically synthesized
cccuggcaugaccaagaau

SEQ ID NO: 84162 - RNA, 19 nt, Artificial Sequence
  Chemically synthesized
gugacagaugugccagaua

SEQ ID NO: 84163 - RNA, 19 nt, Artificial Sequence
  Chemically synthesized
ugauccuggccaucaugua

SEQ ID NO: 84164 - RNA, 19 nt, Artificial Sequence
  Chemically synthesized
aaguauuacuggugguucu

SEQ ID NO: 84165 - RNA, 19 nt, Artificial Sequence
  Chemically synthesized
aucacacgggcaucacaga

SEQ ID NO: 84166 - RNA, 19 nt, Artificial Sequence
  Chemically synthesized
agacugaguugacaccuca

SEQ ID NO: 84167 - RNA, 19 nt, Artificial Sequence
  Chemically synthesized
aacugacaugggaagauuu

SEQ ID NO: 84168 - RNA, 19 nt, Artificial Sequence
  Chemically synthesized
aguuccucaacauucgcau

SEQ ID NO: 84169 - RNA, 19 nt, Artificial Sequence
  Chemically synthesized
ucuucucccugcuccagua

SEQ ID NO: 84170 - RNA, 19 nt, Artificial Sequence
  Chemically synthesized
uggaugcuggcaucuuaga

SEQ ID NO: 84171 - RNA, 19 nt, Artificial Sequence
  Chemically synthesized
cuaugugugugcaugucug

SEQ ID NO: 84172 - RNA, 19 nt, Artificial Sequence
  Chemically synthesized
uugaugggugguacaacaa

SEQ ID NO: 84173 - RNA, 19 nt, Artificial Sequence
  Chemically synthesized
acuuccagaagguucugaa

SEQ ID NO: 84174 - RNA, 19 nt, Artificial Sequence
  Chemically synthesized
cucuauguccugcucauca

SEQ ID NO: 84175 - RNA, 19 nt, Artificial Sequence
  Chemically synthesized
cugcgagaaaccuuccuca

SEQ ID NO: 84176 - RNA, 19 nt, Artificial Sequence
  Chemically synthesized
caccgagagaaguuccaac

SEQ ID NO: 84177 - RNA, 19 nt, Artificial Sequence
  Chemically synthesized
uccugguggucuucaugaa

SEQ ID NO: 84178 - RNA, 19 nt, Artificial Sequence
  Chemically synthesized
acauccugguggucuucau

SEQ ID NO: 84179 - RNA, 19 nt, Artificial Sequence
  Chemically synthesized
ugcuggucgcuguuaucaa

SEQ ID NO: 84180 - RNA, 19 nt, Artificial Sequence
  Chemically synthesized
gaagaugugcgggauuucu

SEQ ID NO: 84181 - RNA, 19 nt, Artificial Sequence
  Chemically synthesized
cuaacaccacaacuaauuu

SEQ ID NO: 84182 - RNA, 19 nt, Artificial Sequence
  Chemically synthesized
agacaagcugaccugacaa

SEQ ID NO: 84183 - RNA, 19 nt, Artificial Sequence
  Chemically synthesized
aggagaaugaccaccagga

SEQ ID NO: 84184 - RNA, 19 nt, Artificial Sequence
  Chemically synthesized
aguuugaguggcuggcuga

SEQ ID NO: 84185 - RNA, 19 nt, Artificial Sequence
  Chemically synthesized
uccuggucccagcaaucau

SEQ ID NO: 84186 - RNA, 19 nt, Artificial Sequence
  Chemically synthesized
uggugaauguguaccuguu

SEQ ID NO: 84187 - RNA, 19 nt, Artificial Sequence
  Chemically synthesized
aggacaaggaggaacugac

SEQ ID NO: 84188 - RNA, 19 nt, Artificial Sequence
  Chemically synthesized
ugcugagauccuucaucga

SEQ ID NO: 84189 - RNA, 19 nt, Artificial Sequence
  Chemically synthesized
cuuuggaauggcaaggcca

SEQ ID NO: 84190 - RNA, 19 nt, Artificial Sequence
  Chemically synthesized
gagcaucgugucugagaag

SEQ ID NO: 84191 - RNA, 19 nt, Artificial Sequence
  Chemically synthesized
cagagcaucgugucugaga

SEQ ID NO: 84192 - RNA, 19 nt, Artificial Sequence
  Chemically synthesized
cuccaagaaggagauugaa

SEQ ID NO: 84193 - RNA, 19 nt, Artificial Sequence
  Chemically synthesized
agaugugcgggauuucugg

SEQ ID NO: 84194 - RNA, 19 nt, Artificial Sequence
  Chemically synthesized
aucagacccuggcccaaua

SEQ ID NO: 84195 - RNA, 19 nt, Artificial Sequence
  Chemically synthesized
gcaugucuguauguguguu

SEQ ID NO: 84196 - RNA, 19 nt, Artificial Sequence
  Chemically synthesized
agcuggcugagaaguucga

SEQ ID NO: 84197 - RNA, 19 nt, Artificial Sequence
  Chemically synthesized
agguggaggagaaugacca

SEQ ID NO: 84198 - RNA, 19 nt, Artificial Sequence
  Chemically synthesized
cuuacacagugugggccau

SEQ ID NO: 84199 - RNA, 19 nt, Artificial Sequence
  Chemically synthesized
uggaggugccugaagucau

SEQ ID NO: 84200 - RNA, 19 nt, Artificial Sequence
  Chemically synthesized
gaauggccucauuuccaag

SEQ ID NO: 84201 - RNA, 19 nt, Artificial Sequence
  Chemically synthesized
ccuuauguuccgcauguac

SEQ ID NO: 84202 - RNA, 19 nt, Artificial Sequence
  Chemically synthesized
caugaaaggcucuccugag

SEQ ID NO: 84203 - RNA, 19 nt, Artificial Sequence
  Chemically synthesized
uugucuggcauaaaggaga

SEQ ID NO: 84204 - RNA, 19 nt, Artificial Sequence
  Chemically synthesized
gaaguuuucccgcacagac

SEQ ID NO: 84205 - RNA, 19 nt, Artificial Sequence
  Chemically synthesized
uauacaggauaccggccau

SEQ ID NO: 84206 - RNA, 19 nt, Artificial Sequence
  Chemically synthesized
ugcagaaaacacucccgga

SEQ ID NO: 84207 - RNA, 19 nt, Artificial Sequence
  Chemically synthesized
ugugcaugucuguaugugu

SEQ ID NO: 84208 - RNA, 19 nt, Artificial Sequence
  Chemically synthesized
guacuaugugugugcaugu

SEQ ID NO: 84209 - RNA, 19 nt, Artificial Sequence
  Chemically synthesized
ucuagggacuagagugaga

SEQ ID NO: 84210 - RNA, 19 nt, Artificial Sequence
  Chemically synthesized
aguggcuggcugacaucau

SEQ ID NO: 84211 - RNA, 19 nt, Artificial Sequence
  Chemically synthesized
cagggcuuugaguacaagu

SEQ ID NO: 84212 - RNA, 19 nt, Artificial Sequence
  Chemically synthesized
uacuggugguucuuccaga

SEQ ID NO: 84213 - RNA, 19 nt, Artificial Sequence
  Chemically synthesized
cucucuggcugacaaggau

SEQ ID NO: 84214 - RNA, 19 nt, Artificial Sequence
  Chemically synthesized
gagcaaugacacuguacug

SEQ ID NO: 84215 - RNA, 19 nt, Artificial Sequence
  Chemically synthesized
guugaagaugugcgggauu

SEQ ID NO: 84216 - RNA, 19 nt, Artificial Sequence
  Chemically synthesized
uaugguuccucgcauuccu

SEQ ID NO: 84217 - RNA, 19 nt, Artificial Sequence
  Chemically synthesized
uuuuaagcacguucuuuca

SEQ ID NO: 84218 - RNA, 19 nt, Artificial Sequence
  Chemically synthesized
ugugucucagccuggagaa

SEQ ID NO: 84219 - RNA, 19 nt, Artificial Sequence
  Chemically synthesized
cuggcaugaccaagaaugu

SEQ ID NO: 84220 - RNA, 19 nt, Artificial Sequence
  Chemically synthesized
aaagcuguaccuugaugga

SEQ ID NO: 84221 - RNA, 19 nt, Artificial Sequence
  Chemically synthesized
aguucaucaggaugcugag

SEQ ID NO: 84222 - RNA, 19 nt, Artificial Sequence
  Chemically synthesized
ugaugagagcagcugugac

SEQ ID NO: 84223 - RNA, 19 nt, Artificial Sequence
  Chemically synthesized
cugaugagagcagcuguga

SEQ ID NO: 84224 - RNA, 19 nt, Artificial Sequence
  Chemically synthesized
auuugugcggcuacgggau

SEQ ID NO: 84225 - RNA, 19 nt, Artificial Sequence
  Chemically synthesized
ucccauaccuccuccucuu

SEQ ID NO: 84226 - RNA, 19 nt, Artificial Sequence
  Chemically synthesized
acuucagaaacaaaucuca

SEQ ID NO: 84227 - RNA, 19 nt, Artificial Sequence
  Chemically synthesized
ugucuagggacuagaguga

SEQ ID NO: 84228 - RNA, 19 nt, Artificial Sequence
  Chemically synthesized
uguuccagguggccauagu

SEQ ID NO: 84229 - RNA, 19 nt, Artificial Sequence
  Chemically synthesized
guucuuccagaccguacca

SEQ ID NO: 84230 - RNA, 19 nt, Artificial Sequence
  Chemically synthesized
gaugggaauggccucauuu

SEQ ID NO: 84231 - RNA, 19 nt, Artificial Sequence
  Chemically synthesized
uuauguuccgcauguacga

SEQ ID NO: 84232 - RNA, 19 nt, Artificial Sequence
  Chemically synthesized
gagaguuccuggacauccu

SEQ ID NO: 84233 - RNA, 19 nt, Artificial Sequence
  Chemically synthesized
cuccggaugagaaauuuca

SEQ ID NO: 84234 - RNA, 19 nt, Artificial Sequence
  Chemically synthesized
agggcaguggauuuggcuu

SEQ ID NO: 84235 - RNA, 19 nt, Artificial Sequence
  Chemically synthesized
uccaguagucucccuucca

SEQ ID NO: 84236 - RNA, 19 nt, Artificial Sequence
  Chemically synthesized
acccuggcccaauaccuau

SEQ ID NO: 84237 - RNA, 19 nt, Artificial Sequence
  Chemically synthesized
auuucacccaagguuuuaa

SEQ ID NO: 84238 - RNA, 19 nt, Artificial Sequence
  Chemically synthesized
caccacaacuaauuucacc

SEQ ID NO: 84239 - RNA, 19 nt, Artificial Sequence
  Chemically synthesized
gacccauggcaagccauuu

SEQ ID NO: 84240 - RNA, 19 nt, Artificial Sequence
  Chemically synthesized
uggcaaaugccuugcagga

SEQ ID NO: 84241 - RNA, 19 nt, Artificial Sequence
  Chemically synthesized
uguggaaaaggccugucag

SEQ ID NO: 84242 - RNA, 19 nt, Artificial Sequence
  Chemically synthesized
gaauguggaaaaggccugu

SEQ ID NO: 84243 - RNA, 19 nt, Artificial Sequence
  Chemically synthesized
cacuaugcuguacaucugu

SEQ ID NO: 84244 - RNA, 19 nt, Artificial Sequence
  Chemically synthesized
gagaaguucgaccucagga

SEQ ID NO: 84245 - RNA, 19 nt, Artificial Sequence
  Chemically synthesized
uugaguggcuggcugacau

SEQ ID NO: 84246 - RNA, 19 nt, Artificial Sequence
  Chemically synthesized
gacggugcaacaguucaag

SEQ ID NO: 84247 - RNA, 19 nt, Artificial Sequence
  Chemically synthesized
cauuccagcccuugcuguu

SEQ ID NO: 84248 - RNA, 19 nt, Artificial Sequence
  Chemically synthesized
cagcgacauugagacugag

SEQ ID NO: 84249 - RNA, 19 nt, Artificial Sequence
  Chemically synthesized
gauuccaggacaaggagga

SEQ ID NO: 84250 - RNA, 19 nt, Artificial Sequence
  Chemically synthesized
aggugguggaguccauguu

SEQ ID NO: 84251 - RNA, 19 nt, Artificial Sequence
  Chemically synthesized
aaaagucucgccuuauguu

SEQ ID NO: 84252 - RNA, 19 nt, Artificial Sequence
  Chemically synthesized
ggugcugcuguuuaacuug

SEQ ID NO: 84253 - RNA, 19 nt, Artificial Sequence
  Chemically synthesized
ugaagauguggaugcacug

SEQ ID NO: 84254 - RNA, 19 nt, Artificial Sequence
  Chemically synthesized
gucugcaacagcuacugga

SEQ ID NO: 84255 - RNA, 19 nt, Artificial Sequence
  Chemically synthesized
uggcuaucacgugcuuuca

SEQ ID NO: 84256 - RNA, 19 nt, Artificial Sequence
  Chemically synthesized
cugagaaaccgcacagugu

SEQ ID NO: 84257 - RNA, 19 nt, Artificial Sequence
  Chemically synthesized
gcauggaugcuggcaucuu

SEQ ID NO: 84258 - RNA, 19 nt, Artificial Sequence
  Chemically synthesized
cugaccugacaaguacuau

SEQ ID NO: 84259 - RNA, 19 nt, Artificial Sequence
  Chemically synthesized
ucugcuuccagacuucaga

SEQ ID NO: 84260 - RNA, 19 nt, Artificial Sequence
  Chemically synthesized
ccucugcuuccagacuuca

SEQ ID NO: 84261 - RNA, 19 nt, Artificial Sequence
  Chemically synthesized
ucugauuucccaccuccca

SEQ ID NO: 84262 - RNA, 19 nt, Artificial Sequence
  Chemically synthesized
ugaugggugguacaacaac

SEQ ID NO: 84263 - RNA, 19 nt, Artificial Sequence
  Chemically synthesized
aaaaggccugucagcucau

SEQ ID NO: 84264 - RNA, 19 nt, Artificial Sequence
  Chemically synthesized
uguaugucuuugccuccca

SEQ ID NO: 84265 - RNA, 19 nt, Artificial Sequence
  Chemically synthesized
acaugggaagauuuucacu

SEQ ID NO: 84266 - RNA, 19 nt, Artificial Sequence
  Chemically synthesized
caaggaugaguucaucagg

SEQ ID NO: 84267 - RNA, 19 nt, Artificial Sequence
  Chemically synthesized
aaaggcucuccugaggaaa

SEQ ID NO: 84268 - RNA, 19 nt, Artificial Sequence
  Chemically synthesized
aggacuuauccuggcuaga

SEQ ID NO: 84269 - RNA, 19 nt, Artificial Sequence
  Chemically synthesized
gccuacaaagugcugaaga

SEQ ID NO: 84270 - RNA, 19 nt, Artificial Sequence
  Chemically synthesized
agaagacaagcugaccuga

SEQ ID NO: 84271 - RNA, 19 nt, Artificial Sequence
  Chemically synthesized
accucaggaccacuaugcu

SEQ ID NO: 84272 - RNA, 19 nt, Artificial Sequence
  Chemically synthesized
cauggacacuucugguugg

SEQ ID NO: 84273 - RNA, 19 nt, Artificial Sequence
  Chemically synthesized
ucuuccuggucccagcaau

SEQ ID NO: 84274 - RNA, 19 nt, Artificial Sequence
  Chemically synthesized
aauguguaccuguucucca

SEQ ID NO: 84275 - RNA, 19 nt, Artificial Sequence
  Chemically synthesized
guccucacagucuuacaca

SEQ ID NO: 84276 - RNA, 19 nt, Artificial Sequence
  Chemically synthesized
gagaaguuccaacgcagcu

SEQ ID NO: 84277 - RNA, 19 nt, Artificial Sequence
  Chemically synthesized
ugaguugacaccucagaga

SEQ ID NO: 84278 - RNA, 19 nt, Artificial Sequence
  Chemically synthesized
acugacaugggaagauuuu

SEQ ID NO: 84279 - RNA, 19 nt, Artificial Sequence
  Chemically synthesized
aggaacugacaugggaaga

SEQ ID NO: 84280 - RNA, 19 nt, Artificial Sequence
  Chemically synthesized
aggugcuggacaucaacca

SEQ ID NO: 84281 - RNA, 19 nt, Artificial Sequence
  Chemically synthesized
uuuugagggcaguggauuu

SEQ ID NO: 84282 - RNA, 19 nt, Artificial Sequence
  Chemically synthesized
aaugggcuguucuccaaga

SEQ ID NO: 84283 - RNA, 19 nt, Artificial Sequence
  Chemically synthesized
cccagucuaacaccacaac

SEQ ID NO: 84284 - RNA, 19 nt, Artificial Sequence
  Chemically synthesized
caaagugaaaccucugcuu

SEQ ID NO: 84285 - RNA, 19 nt, Artificial Sequence
  Chemically synthesized
uagggacuagagugagaag

SEQ ID NO: 84286 - RNA, 19 nt, Artificial Sequence
  Chemically synthesized
acaccucaccucuguucuu

SEQ ID NO: 84287 - RNA, 19 nt, Artificial Sequence
  Chemically synthesized
aguugagcagagguuugag

SEQ ID NO: 84288 - RNA, 19 nt, Artificial Sequence
  Chemically synthesized
cagcgauuugauggguggu

SEQ ID NO: 84289 - RNA, 19 nt, Artificial Sequence
  Chemically synthesized
gaggugcagcgauuugaug

SEQ ID NO: 84290 - RNA, 19 nt, Artificial Sequence
  Chemically synthesized
cugccaaguguucuguaag

SEQ ID NO: 84291 - RNA, 19 nt, Artificial Sequence
  Chemically synthesized
aggugucaguguuaguggg

SEQ ID NO: 84292 - RNA, 19 nt, Artificial Sequence
  Chemically synthesized
auaaguuugaggugucagu

SEQ ID NO: 84293 - RNA, 19 nt, Artificial Sequence
  Chemically synthesized
cuugauggaccauuuggag

SEQ ID NO: 84294 - RNA, 19 nt, Artificial Sequence
  Chemically synthesized
augucuuugccucccacca

SEQ ID NO: 84295 - RNA, 19 nt, Artificial Sequence
  Chemically synthesized
ccuuccugcgagaaaccuu

SEQ ID NO: 84296 - RNA, 19 nt, Artificial Sequence
  Chemically synthesized
gaguucaucaggaugcuga

SEQ ID NO: 84297 - RNA, 19 nt, Artificial Sequence
  Chemically synthesized
ugaaaggcucuccugagga

SEQ ID NO: 84298 - RNA, 19 nt, Artificial Sequence
  Chemically synthesized
gauggcaauggcuaccugu

SEQ ID NO: 84299 - RNA, 19 nt, Artificial Sequence
  Chemically synthesized
uguucgugacuauuuugag

SEQ ID NO: 84300 - RNA, 19 nt, Artificial Sequence
  Chemically synthesized
gauaccggccauuucugga

SEQ ID NO: 84301 - RNA, 19 nt, Artificial Sequence
  Chemically synthesized
gaguuccucaacauucgca

SEQ ID NO: 84302 - RNA, 19 nt, Artificial Sequence
  Chemically synthesized
gugugugcaugucuguaug

SEQ ID NO: 84303 - RNA, 19 nt, Artificial Sequence
  Chemically synthesized
aaguacuaugugugugcau

SEQ ID NO: 84304 - RNA, 19 nt, Artificial Sequence
  Chemically synthesized
uguccugcucaucauccau

SEQ ID NO: 84305 - RNA, 19 nt, Artificial Sequence
  Chemically synthesized
ugcucuauguccugcucau

SEQ ID NO: 84306 - RNA, 19 nt, Artificial Sequence
  Chemically synthesized
ccucacagucuuacacagu

SEQ ID NO: 84307 - RNA, 19 nt, Artificial Sequence
  Chemically synthesized
gaaaccuuccucaaccgcu

SEQ ID NO: 84308 - RNA, 19 nt, Artificial Sequence
  Chemically synthesized
agcugaugagagcagcugu

SEQ ID NO: 84309 - RNA, 19 nt, Artificial Sequence
  Chemically synthesized
uccgaaauaccacccugca

SEQ ID NO: 84310 - RNA, 19 nt, Artificial Sequence
  Chemically synthesized
uguguugguugaagaugug

SEQ ID NO: 84311 - RNA, 19 nt, Artificial Sequence
  Chemically synthesized
caagccuacaaagugcuga

SEQ ID NO: 84312 - RNA, 19 nt, Artificial Sequence
  Chemically synthesized
acaggauaccggccauuuc

SEQ ID NO: 84313 - RNA, 19 nt, Artificial Sequence
  Chemically synthesized
cuaucacgugcuuucagac

SEQ ID NO: 84314 - RNA, 19 nt, Artificial Sequence
  Chemically synthesized
gggcaaagugaaaccucug

SEQ ID NO: 84315 - RNA, 19 nt, Artificial Sequence
  Chemically synthesized
gcagugucuagggacuaga

SEQ ID NO: 84316 - RNA, 19 nt, Artificial Sequence
  Chemically synthesized
cucaccucuguucuuccua

SEQ ID NO: 84317 - RNA, 19 nt, Artificial Sequence
  Chemically synthesized
uucugaaccggagucuauu

SEQ ID NO: 84318 - RNA, 19 nt, Artificial Sequence
  Chemically synthesized
caggaguggcauaaguuug

SEQ ID NO: 84319 - RNA, 19 nt, Artificial Sequence
  Chemically synthesized
uuauuuucaucaugggcuu

SEQ ID NO: 84320 - RNA, 19 nt, Artificial Sequence
  Chemically synthesized
auguccugcucaucaucca

SEQ ID NO: 84321 - RNA, 19 nt, Artificial Sequence
  Chemically synthesized
caucaccuuccugcgagaa

SEQ ID NO: 84322 - RNA, 19 nt, Artificial Sequence
  Chemically synthesized
aguugacaccucagagacu

SEQ ID NO: 84323 - RNA, 19 nt, Artificial Sequence
  Chemically synthesized
gacugaguugacaccucag

SEQ ID NO: 84324 - RNA, 19 nt, Artificial Sequence
  Chemically synthesized
ggaugaguucaucaggaug

SEQ ID NO: 84325 - RNA, 19 nt, Artificial Sequence
  Chemically synthesized
ggucuucaugaaaggcucu

SEQ ID NO: 84326 - RNA, 19 nt, Artificial Sequence
  Chemically synthesized
uggagaccuuuuucaggca

SEQ ID NO: 84327 - RNA, 19 nt, Artificial Sequence
  Chemically synthesized
ugaagaaauccgaaauacc

SEQ ID NO: 84328 - RNA, 19 nt, Artificial Sequence
  Chemically synthesized
acgugcuuucagaccuggu

SEQ ID NO: 84329 - RNA, 19 nt, Artificial Sequence
  Chemically synthesized
aggaccaggaugugucuca

SEQ ID NO: 84330 - RNA, 19 nt, Artificial Sequence
  Chemically synthesized
ccucaccucuguucuuccu

SEQ ID NO: 84331 - RNA, 19 nt, Artificial Sequence
  Chemically synthesized
aaggccugucagcucauca

SEQ ID NO: 84332 - RNA, 19 nt, Artificial Sequence
  Chemically synthesized
gagucuauucacaggccug

SEQ ID NO: 84333 - RNA, 19 nt, Artificial Sequence
  Chemically synthesized
agaagguggagaucagcgu

SEQ ID NO: 84334 - RNA, 19 nt, Artificial Sequence
  Chemically synthesized
caggacaaggaggaacuga

SEQ ID NO: 84335 - RNA, 19 nt, Artificial Sequence
  Chemically synthesized
auuccaggacaaggaggaa

SEQ ID NO: 84336 - RNA, 19 nt, Artificial Sequence
  Chemically synthesized
guucgugacuauuuugagg

SEQ ID NO: 84337 - RNA, 19 nt, Artificial Sequence
  Chemically synthesized
ucugcagcccaaugucuuu

SEQ ID NO: 84338 - RNA, 19 nt, Artificial Sequence
  Chemically synthesized
cucugcagcccaaugucuu

SEQ ID NO: 84339 - RNA, 19 nt, Artificial Sequence
  Chemically synthesized
auguguugguugaagaugu

SEQ ID NO: 84340 - RNA, 19 nt, Artificial Sequence
  Chemically synthesized
ucuucuuuggcuaucacgu

SEQ ID NO: 84341 - RNA, 19 nt, Artificial Sequence
  Chemically synthesized
uguaugcaaugcuccucag

SEQ ID NO: 84342 - RNA, 19 nt, Artificial Sequence
  Chemically synthesized
auguaugcaaugcuccuca

SEQ ID NO: 84343 - RNA, 19 nt, Artificial Sequence
  Chemically synthesized
cauaccuccuccucuucug

SEQ ID NO: 84344 - RNA, 19 nt, Artificial Sequence
  Chemically synthesized
ugaccugacaaguacuaug

SEQ ID NO: 84345 - RNA, 19 nt, Artificial Sequence
  Chemically synthesized
gacuagagugagaaguagg

SEQ ID NO: 84346 - RNA, 19 nt, Artificial Sequence
  Chemically synthesized
accucccaaccuuguucca

SEQ ID NO: 84347 - RNA, 19 nt, Artificial Sequence
  Chemically synthesized
cauuaugagaacuucuagg

SEQ ID NO: 84348 - RNA, 19 nt, Artificial Sequence
  Chemically synthesized
agcucaucaacaggcagga

SEQ ID NO: 84349 - RNA, 19 nt, Artificial Sequence
  Chemically synthesized
auguggaaaaggccuguca

SEQ ID NO: 84350 - RNA, 19 nt, Artificial Sequence
  Chemically synthesized
agagguggaggagaaugac

SEQ ID NO: 84351 - RNA, 19 nt, Artificial Sequence
  Chemically synthesized
uugaggugucaguguuagu

SEQ ID NO: 84352 - RNA, 19 nt, Artificial Sequence
  Chemically synthesized
caucuucuuccugguccca

SEQ ID NO: 84353 - RNA, 19 nt, Artificial Sequence
  Chemically synthesized
cauccugcucuauguccug

SEQ ID NO: 84354 - RNA, 19 nt, Artificial Sequence
  Chemically synthesized
caguucaagcgcuucauug

SEQ ID NO: 84355 - RNA, 19 nt, Artificial Sequence
  Chemically synthesized
cagccaggauaugaucugu

SEQ ID NO: 84356 - RNA, 19 nt, Artificial Sequence
  Chemically synthesized
ggugccugaagucaucaag

SEQ ID NO: 84357 - RNA, 19 nt, Artificial Sequence
  Chemically synthesized
aauagcgagcuccgcuuca

SEQ ID NO: 84358 - RNA, 19 nt, Artificial Sequence
  Chemically synthesized
uucacuucaugcugcggga

SEQ ID NO: 84359 - RNA, 19 nt, Artificial Sequence
  Chemically synthesized
ugguggucuucaugaaagg

SEQ ID NO: 84360 - RNA, 19 nt, Artificial Sequence
  Chemically synthesized
aagaaauccgaaauaccac

SEQ ID NO: 84361 - RNA, 19 nt, Artificial Sequence
  Chemically synthesized
guugguugaagaugugcgg

SEQ ID NO: 84362 - RNA, 19 nt, Artificial Sequence
  Chemically synthesized
aaagugcugaagaugugga

SEQ ID NO: 84363 - RNA, 19 nt, Artificial Sequence
  Chemically synthesized
ccauaccuccuccucuucu

SEQ ID NO: 84364 - RNA, 19 nt, Artificial Sequence
  Chemically synthesized
ggugaguguaaggaugcag

SEQ ID NO: 84365 - RNA, 19 nt, Artificial Sequence
  Chemically synthesized
gugcaugucuguaugugug

SEQ ID NO: 84366 - RNA, 19 nt, Artificial Sequence
  Chemically synthesized
aucucagaagacaagcuga

SEQ ID NO: 84367 - RNA, 19 nt, Artificial Sequence
  Chemically synthesized
agugaaaccucugcuucca

SEQ ID NO: 84368 - RNA, 19 nt, Artificial Sequence
  Chemically synthesized
acuucucccaccauuauga

SEQ ID NO: 84369 - RNA, 19 nt, Artificial Sequence
  Chemically synthesized
cugagaaguucgaccucag

SEQ ID NO: 84370 - RNA, 19 nt, Artificial Sequence
  Chemically synthesized
gugucaguguuagugggag

SEQ ID NO: 84371 - RNA, 19 nt, Artificial Sequence
  Chemically synthesized
uugaguacaagucagggca

SEQ ID NO: 84372 - RNA, 19 nt, Artificial Sequence
  Chemically synthesized
ucuccuacaucuugcucac

SEQ ID NO: 84373 - RNA, 19 nt, Artificial Sequence
  Chemically synthesized
ggcucuccugaggaaaagu

SEQ ID NO: 84374 - RNA, 19 nt, Artificial Sequence
  Chemically synthesized
agaccuuuuucaggcaccu

SEQ ID NO: 84375 - RNA, 19 nt, Artificial Sequence
  Chemically synthesized
aguaugaccuggugcugcu

SEQ ID NO: 84376 - RNA, 19 nt, Artificial Sequence
  Chemically synthesized
cacucugcugcucaagauc

SEQ ID NO: 84377 - RNA, 19 nt, Artificial Sequence
  Chemically synthesized
ucuccaagaaggagauuga

SEQ ID NO: 84378 - RNA, 19 nt, Artificial Sequence
  Chemically synthesized
gaaugggcuguucuccaag

SEQ ID NO: 84379 - RNA, 19 nt, Artificial Sequence
  Chemically synthesized
aggaaugggcuguucucca

SEQ ID NO: 84380 - RNA, 19 nt, Artificial Sequence
  Chemically synthesized
uauccuggcuagagcugcu

SEQ ID NO: 84381 - RNA, 19 nt, Artificial Sequence
  Chemically synthesized
cugaagauguggaugcacu

SEQ ID NO: 84382 - RNA, 19 nt, Artificial Sequence
  Chemically synthesized
agaccuuagcaacaccauc

SEQ ID NO: 84383 - RNA, 19 nt, Artificial Sequence
  Chemically synthesized
uacagaaacccacucggca

SEQ ID NO: 84384 - RNA, 19 nt, Artificial Sequence
  Chemically synthesized
agugucuagggacuagagu

SEQ ID NO: 84385 - RNA, 19 nt, Artificial Sequence
  Chemically synthesized
ucuucaacucccugcagga

SEQ ID NO: 84386 - RNA, 19 nt, Artificial Sequence
  Chemically synthesized
aaguuugaggugucagugu

SEQ ID NO: 84387 - RNA, 19 nt, Artificial Sequence
  Chemically synthesized
cuauguccugcucaucauc

SEQ ID NO: 84388 - RNA, 19 nt, Artificial Sequence
  Chemically synthesized
gugguucuuccagaccgua

SEQ ID NO: 84389 - RNA, 19 nt, Artificial Sequence
  Chemically synthesized
guggugaauguguaccugu

SEQ ID NO: 84390 - RNA, 19 nt, Artificial Sequence
  Chemically synthesized
ucuuacacagugugggcca

SEQ ID NO: 84391 - RNA, 19 nt, Artificial Sequence
  Chemically synthesized
ccuggugcugcuguuuaac

SEQ ID NO: 84392 - RNA, 19 nt, Artificial Sequence
  Chemically synthesized
gucaacuucguccugucca

SEQ ID NO: 84393 - RNA, 19 nt, Artificial Sequence
  Chemically synthesized
aauggcaaggccacaagga

SEQ ID NO: 84394 - RNA, 19 nt, Artificial Sequence
  Chemically synthesized
uguugcuucccuuugguga

SEQ ID NO: 84395 - RNA, 19 nt, Artificial Sequence
  Chemically synthesized
caaaugccuugcaggaggu

SEQ ID NO: 84396 - RNA, 19 nt, Artificial Sequence
  Chemically synthesized
ugaguguaaggaugcagug

SEQ ID NO: 84397 - RNA, 19 nt, Artificial Sequence
  Chemically synthesized
ugaaaccucugcuuccaga

SEQ ID NO: 84398 - RNA, 19 nt, Artificial Sequence
  Chemically synthesized
uggaggagaaugaccacca

SEQ ID NO: 84399 - RNA, 19 nt, Artificial Sequence
  Chemically synthesized
cucuagcauggacacuucu

SEQ ID NO: 84400 - RNA, 19 nt, Artificial Sequence
  Chemically synthesized
uugugcugcuccugauccu

SEQ ID NO: 84401 - RNA, 19 nt, Artificial Sequence
  Chemically synthesized
agagaaguuccaacgcagc

SEQ ID NO: 84402 - RNA, 19 nt, Artificial Sequence
  Chemically synthesized
aagguaacgucauuccagc

SEQ ID NO: 84403 - RNA, 19 nt, Artificial Sequence
  Chemically synthesized
acugaguugacaccucaga

SEQ ID NO: 84404 - RNA, 19 nt, Artificial Sequence
  Chemically synthesized
uuuccaaggaugaguucau

SEQ ID NO: 84405 - RNA, 19 nt, Artificial Sequence
  Chemically synthesized
gacaaggauggcaauggcu

SEQ ID NO: 84406 - RNA, 19 nt, Artificial Sequence
  Chemically synthesized
cuggugcugcuguuuaacu

SEQ ID NO: 84407 - RNA, 19 nt, Artificial Sequence
  Chemically synthesized
uggugaccgcuacugguuu

SEQ ID NO: 84408 - RNA, 19 nt, Artificial Sequence
  Chemically synthesized
uugaacaauuugugcggcu

SEQ ID NO: 84409 - RNA, 19 nt, Artificial Sequence
  Chemically synthesized
acugggcuugucucccauu

SEQ ID NO: 84410 - RNA, 19 nt, Artificial Sequence
  Chemically synthesized
caaagugcugaagaugugg

SEQ ID NO: 84411 - RNA, 19 nt, Artificial Sequence
  Chemically synthesized
agaaaugccagcugccacu

SEQ ID NO: 84412 - RNA, 19 nt, Artificial Sequence
  Chemically synthesized
ugagaaaugccagcugcca

SEQ ID NO: 84413 - RNA, 19 nt, Artificial Sequence
  Chemically synthesized
ccagucuaacaccacaacu

SEQ ID NO: 84414 - RNA, 19 nt, Artificial Sequence
  Chemically synthesized
aaaugccuugcaggaggua

SEQ ID NO: 84415 - RNA, 19 nt, Artificial Sequence
  Chemically synthesized
cagugucuagggacuagag

SEQ ID NO: 84416 - RNA, 19 nt, Artificial Sequence
  Chemically synthesized
cucagccuggagaaauggu

SEQ ID NO: 84417 - RNA, 19 nt, Artificial Sequence
  Chemically synthesized
uuuugccuccauccucaaa

SEQ ID NO: 84418 - RNA, 19 nt, Artificial Sequence
  Chemically synthesized
ugaguacaagucagggcag

SEQ ID NO: 84419 - RNA, 19 nt, Artificial Sequence
  Chemically synthesized
cuuuccuggccucuuccau

SEQ ID NO: 84420 - RNA, 19 nt, Artificial Sequence
  Chemically synthesized
uguucuccuacaucuugcu

SEQ ID NO: 84421 - RNA, 19 nt, Artificial Sequence
  Chemically synthesized
cugaguugacaccucagag

SEQ ID NO: 84422 - RNA, 19 nt, Artificial Sequence
  Chemically synthesized
agcgacauugagacugagu

SEQ ID NO: 84423 - RNA, 19 nt, Artificial Sequence
  Chemically synthesized
augaucugucccucuccca

SEQ ID NO: 84424 - RNA, 19 nt, Artificial Sequence
  Chemically synthesized
cugaagucaucaaggaccu

SEQ ID NO: 84425 - RNA, 19 nt, Artificial Sequence
  Chemically synthesized
gccugaagucaucaaggac

SEQ ID NO: 84426 - RNA, 19 nt, Artificial Sequence
  Chemically synthesized
caaggaggaacugacaugg

SEQ ID NO: 84427 - RNA, 19 nt, Artificial Sequence
  Chemically synthesized
gcugagauccuucaucgag

SEQ ID NO: 84428 - RNA, 19 nt, Artificial Sequence
  Chemically synthesized
guuuaacuuggaggaagag

SEQ ID NO: 84429 - RNA, 19 nt, Artificial Sequence
  Chemically synthesized
gaugagaaauuucaagagg

SEQ ID NO: 84430 - RNA, 19 nt, Artificial Sequence
  Chemically synthesized
ucuguuguucgugacuauu

SEQ ID NO: 84431 - RNA, 19 nt, Artificial Sequence
  Chemically synthesized
augggcuguucuccaagaa

SEQ ID NO: 84432 - RNA, 19 nt, Artificial Sequence
  Chemically synthesized
uguucagcaccaucguccu

SEQ ID NO: 84433 - RNA, 19 nt, Artificial Sequence
  Chemically synthesized
uguacaaccaggacuuauc

SEQ ID NO: 84434 - RNA, 19 nt, Artificial Sequence
  Chemically synthesized
cagcuuccugcagaaaaca

SEQ ID NO: 84435 - RNA, 19 nt, Artificial Sequence
  Chemically synthesized
ggcuaucacgugcuuucag

SEQ ID NO: 84436 - RNA, 19 nt, Artificial Sequence
  Chemically synthesized
aauuucacccaagguuuua

SEQ ID NO: 84437 - RNA, 19 nt, Artificial Sequence
  Chemically synthesized
auggaugcuggcaucuuag

SEQ ID NO: 84438 - RNA, 19 nt, Artificial Sequence
  Chemically synthesized
gugucuagggacuagagug

SEQ ID NO: 84439 - RNA, 19 nt, Artificial Sequence
  Chemically synthesized
cacaccucaccucuguucu

SEQ ID NO: 84440 - RNA, 19 nt, Artificial Sequence
  Chemically synthesized
cacuucucccaccauuaug

SEQ ID NO: 84441 - RNA, 19 nt, Artificial Sequence
  Chemically synthesized
gcugagaaguucgaccuca

SEQ ID NO: 84442 - RNA, 19 nt, Artificial Sequence
  Chemically synthesized
ggucuucaagucauccguc

SEQ ID NO: 84443 - RNA, 19 nt, Artificial Sequence
  Chemically synthesized
caaagaccuggucuucaag

SEQ ID NO: 84444 - RNA, 19 nt, Artificial Sequence
  Chemically synthesized
gaguggcauaaguuugagg

SEQ ID NO: 84445 - RNA, 19 nt, Artificial Sequence
  Chemically synthesized
aguauuacuggugguucuu

SEQ ID NO: 84446 - RNA, 19 nt, Artificial Sequence
  Chemically synthesized
gcuucauugagaacuaccg

SEQ ID NO: 84447 - RNA, 19 nt, Artificial Sequence
  Chemically synthesized
ugacaccucagagacugca

SEQ ID NO: 84448 - RNA, 19 nt, Artificial Sequence
  Chemically synthesized
augcugcgggaccacaaua

SEQ ID NO: 84449 - RNA, 19 nt, Artificial Sequence
  Chemically synthesized
guuccgcauguacgacuuu

SEQ ID NO: 84450 - RNA, 19 nt, Artificial Sequence
  Chemically synthesized
caccuccuggagaccuuuu

SEQ ID NO: 84451 - RNA, 19 nt, Artificial Sequence
  Chemically synthesized
aaugucuuugucuggcaua

SEQ ID NO: 84452 - RNA, 19 nt, Artificial Sequence
  Chemically synthesized
uacaaagugcugaagaugu

SEQ ID NO: 84453 - RNA, 19 nt, Artificial Sequence
  Chemically synthesized
uuucagaccuggugagcgu

SEQ ID NO: 84454 - RNA, 19 nt, Artificial Sequence
  Chemically synthesized
aagguuuuaagcacguucu

SEQ ID NO: 84455 - RNA, 19 nt, Artificial Sequence
  Chemically synthesized
augugugugcaugucugua

SEQ ID NO: 84456 - RNA, 19 nt, Artificial Sequence
  Chemically synthesized
augugucucagccuggaga

SEQ ID NO: 84457 - RNA, 19 nt, Artificial Sequence
  Chemically synthesized
ugucugugcacaucuacau

SEQ ID NO: 84458 - RNA, 19 nt, Artificial Sequence
  Chemically synthesized
cugacaucauccgagaggu

SEQ ID NO: 84459 - RNA, 19 nt, Artificial Sequence
  Chemically synthesized
ccucagggagaucuacuca

SEQ ID NO: 84460 - RNA, 19 nt, Artificial Sequence
  Chemically synthesized
ccugcucaucauccauggu

SEQ ID NO: 84461 - RNA, 19 nt, Artificial Sequence
  Chemically synthesized
ucuuugccucccaccacuu

SEQ ID NO: 84462 - RNA, 19 nt, Artificial Sequence
  Chemically synthesized
cucucuugccucuuuccug

SEQ ID NO: 84463 - RNA, 19 nt, Artificial Sequence
  Chemically synthesized
ccucucuugccucuuuccu

SEQ ID NO: 84464 - RNA, 19 nt, Artificial Sequence
  Chemically synthesized
acauugagacugaguugac

SEQ ID NO: 84465 - RNA, 19 nt, Artificial Sequence
  Chemically synthesized
augaccuggugcugcuguu

SEQ ID NO: 84466 - RNA, 19 nt, Artificial Sequence
  Chemically synthesized
aacuucguccuguccagca

SEQ ID NO: 84467 - RNA, 19 nt, Artificial Sequence
  Chemically synthesized
agauccgugugguagaugg

SEQ ID NO: 84468 - RNA, 19 nt, Artificial Sequence
  Chemically synthesized
acaucaacccugcacucuc

SEQ ID NO: 84469 - RNA, 19 nt, Artificial Sequence
  Chemically synthesized
caccuaccagaacaucgcu

SEQ ID NO: 84470 - RNA, 19 nt, Artificial Sequence
  Chemically synthesized
aaugcuccucagcccucuu

SEQ ID NO: 84471 - RNA, 19 nt, Artificial Sequence
  Chemically synthesized
uucagaaacaaaucucaga

SEQ ID NO: 84472 - RNA, 19 nt, Artificial Sequence
  Chemically synthesized
ugucucagccuggagaaau

SEQ ID NO: 84473 - RNA, 19 nt, Artificial Sequence
  Chemically synthesized
gaugggugguacaacaacc

SEQ ID NO: 84474 - RNA, 19 nt, Artificial Sequence
  Chemically synthesized
ggugucugugcacaucuac

SEQ ID NO: 84475 - RNA, 19 nt, Artificial Sequence
  Chemically synthesized
ucuucaagucauccgucag

SEQ ID NO: 84476 - RNA, 19 nt, Artificial Sequence
  Chemically synthesized
guggcauaaguuugaggug

SEQ ID NO: 84477 - RNA, 19 nt, Artificial Sequence
  Chemically synthesized
gauggaccauuuggagagg

SEQ ID NO: 84478 - RNA, 19 nt, Artificial Sequence
  Chemically synthesized
gaggugccugaagucauca

SEQ ID NO: 84479 - RNA, 19 nt, Artificial Sequence
  Chemically synthesized
cugacaugggaagauuuuc

SEQ ID NO: 84480 - RNA, 19 nt, Artificial Sequence
  Chemically synthesized
ugacaaggauggcaauggc

SEQ ID NO: 84481 - RNA, 19 nt, Artificial Sequence
  Chemically synthesized
ccuggagaccuuuuucagg

SEQ ID NO: 84482 - RNA, 19 nt, Artificial Sequence
  Chemically synthesized
uguucuccaagaaggagau

SEQ ID NO: 84483 - RNA, 19 nt, Artificial Sequence
  Chemically synthesized
aucguccuugaacaauuug

SEQ ID NO: 84484 - RNA, 19 nt, Artificial Sequence
  Chemically synthesized
cacugaaguuuucccgcac

SEQ ID NO: 84485 - RNA, 19 nt, Artificial Sequence
  Chemically synthesized
ugaagaugugcgggauuuc

SEQ ID NO: 84486 - RNA, 19 nt, Artificial Sequence
  Chemically synthesized
aaaacacucccggaguaua

SEQ ID NO: 84487 - RNA, 19 nt, Artificial Sequence
  Chemically synthesized
auggcaagccauuuacaga

SEQ ID NO: 84488 - RNA, 19 nt, Artificial Sequence
  Chemically synthesized
ugcaugucuguaugugugu

SEQ ID NO: 84489 - RNA, 19 nt, Artificial Sequence
  Chemically synthesized
cagacuucagaaacaaauc

SEQ ID NO: 84490 - RNA, 19 nt, Artificial Sequence
  Chemically synthesized
ccaagaauguggaaaaggc

SEQ ID NO: 84491 - RNA, 19 nt, Artificial Sequence
  Chemically synthesized
cuuccagaagguucugaac

SEQ ID NO: 84492 - RNA, 19 nt, Artificial Sequence
  Chemically synthesized
cuagcauggacacuucugg

SEQ ID NO: 84493 - RNA, 19 nt, Artificial Sequence
  Chemically synthesized
ugucaguguuagugggagg

SEQ ID NO: 84494 - RNA, 19 nt, Artificial Sequence
  Chemically synthesized
gaggugucaguguuagugg

SEQ ID NO: 84495 - RNA, 19 nt, Artificial Sequence
  Chemically synthesized
aguggcauaaguuugaggu

SEQ ID NO: 84496 - RNA, 19 nt, Artificial Sequence
  Chemically synthesized
gaagaagguggagaucagc

SEQ ID NO: 84497 - RNA, 19 nt, Artificial Sequence
  Chemically synthesized
cauucuaaucccugagccc

SEQ ID NO: 84498 - RNA, 19 nt, Artificial Sequence
  Chemically synthesized
aucaccuuccugcgagaaa

SEQ ID NO: 84499 - RNA, 19 nt, Artificial Sequence
  Chemically synthesized
cuacaucuugcucaccaug

SEQ ID NO: 84500 - RNA, 19 nt, Artificial Sequence
  Chemically synthesized
cuccuacaucagccaggau

SEQ ID NO: 84501 - RNA, 19 nt, Artificial Sequence
  Chemically synthesized
caucgagaucuccaacaac

SEQ ID NO: 84502 - RNA, 19 nt, Artificial Sequence
  Chemically synthesized
augaguucaucaggaugcu

SEQ ID NO: 84503 - RNA, 19 nt, Artificial Sequence
  Chemically synthesized
cugaggaaaagucucgccu

SEQ ID NO: 84504 - RNA, 19 nt, Artificial Sequence
  Chemically synthesized
cucuccugaggaaaagucu

SEQ ID NO: 84505 - RNA, 19 nt, Artificial Sequence
  Chemically synthesized
ugggugaaauuaguugugg

SEQ ID NO: 84506 - RNA, 19 nt, Artificial Sequence
  Chemically synthesized
uaagaugccagcauccaug

SEQ ID NO: 84507 - RNA, 19 nt, Artificial Sequence
  Chemically synthesized
uucagugcugagcugucuc

SEQ ID NO: 84508 - RNA, 19 nt, Artificial Sequence
  Chemically synthesized
uuaguugugguguuagacu

SEQ ID NO: 84509 - RNA, 19 nt, Artificial Sequence
  Chemically synthesized
acuugaguuccgauugaug

SEQ ID NO: 84510 - RNA, 19 nt, Artificial Sequence
  Chemically synthesized
ucccacugcauccuuacac

SEQ ID NO: 84511 - RNA, 19 nt, Artificial Sequence
  Chemically synthesized
ugcauccuuacacucaccg

SEQ ID NO: 84512 - RNA, 19 nt, Artificial Sequence
  Chemically synthesized
uucaccacgcugaucucca

SEQ ID NO: 84513 - RNA, 19 nt, Artificial Sequence
  Chemically synthesized
ugucaacucagucucaaug

SEQ ID NO: 84514 - RNA, 19 nt, Artificial Sequence
  Chemically synthesized
uaagacugugaggacgaug

SEQ ID NO: 84515 - RNA, 19 nt, Artificial Sequence
  Chemically synthesized
cuugaguuccgauugauga

SEQ ID NO: 84516 - RNA, 19 nt, Artificial Sequence
  Chemically synthesized
uuuggguaucuggcacauc

SEQ ID NO: 84517 - RNA, 19 nt, Artificial Sequence
  Chemically synthesized
uccacugcccucaaaauag

SEQ ID NO: 84518 - RNA, 19 nt, Artificial Sequence
  Chemically synthesized
ugaggcagccagaaauagg

SEQ ID NO: 84519 - RNA, 19 nt, Artificial Sequence
  Chemically synthesized
uucggauuucuucaaucuc

SEQ ID NO: 84520 - RNA, 19 nt, Artificial Sequence
  Chemically synthesized
gcacaaauuguucaaggac

SEQ ID NO: 84521 - RNA, 19 nt, Artificial Sequence
  Chemically synthesized
uugcauacauagguauugg

SEQ ID NO: 84522 - RNA, 19 nt, Artificial Sequence
  Chemically synthesized
ugugaugcccgugugaugu

SEQ ID NO: 84523 - RNA, 19 nt, Artificial Sequence
  Chemically synthesized
auuaguugugguguuagac

SEQ ID NO: 84524 - RNA, 19 nt, Artificial Sequence
  Chemically synthesized
uugggaggugggaaaucag

SEQ ID NO: 84525 - RNA, 19 nt, Artificial Sequence
  Chemically synthesized
uccacauucuuggucaugc

SEQ ID NO: 84526 - RNA, 19 nt, Artificial Sequence
  Chemically synthesized
uguaaauggcuugccaugg

SEQ ID NO: 84527 - RNA, 19 nt, Artificial Sequence
  Chemically synthesized
uggaaugacguuaccuucu

SEQ ID NO: 84528 - RNA, 19 nt, Artificial Sequence
  Chemically synthesized
ugacguuaccuucuugcca

SEQ ID NO: 84529 - RNA, 19 nt, Artificial Sequence
  Chemically synthesized
uaccuucuugccaaaccuc

SEQ ID NO: 84530 - RNA, 19 nt, Artificial Sequence
  Chemically synthesized
uuugacacagagcugcgug

SEQ ID NO: 84531 - RNA, 19 nt, Artificial Sequence
  Chemically synthesized
uuccacauucuuggucaug

SEQ ID NO: 84532 - RNA, 19 nt, Artificial Sequence
  Chemically synthesized
ugaacuguugcaccgucug

SEQ ID NO: 84533 - RNA, 19 nt, Artificial Sequence
  Chemically synthesized
uccuucuuggagaacagcc

SEQ ID NO: 84534 - RNA, 19 nt, Artificial Sequence
  Chemically synthesized
uugucuucugagauuuguu

SEQ ID NO: 84535 - RNA, 19 nt, Artificial Sequence
  Chemically synthesized
uuucuccaggcugagacac

SEQ ID NO: 84536 - RNA, 19 nt, Artificial Sequence
  Chemically synthesized
uuguaccacccaucaaauc

SEQ ID NO: 84537 - RNA, 19 nt, Artificial Sequence
  Chemically synthesized
uagacuccgguucagaacc

SEQ ID NO: 84538 - RNA, 19 nt, Artificial Sequence
  Chemically synthesized
uaacacugacaccucaaac

SEQ ID NO: 84539 - RNA, 19 nt, Artificial Sequence
  Chemically synthesized
auauccuggcugauguagg

SEQ ID NO: 84540 - RNA, 19 nt, Artificial Sequence
  Chemically synthesized
auuccugguguucucaaac

SEQ ID NO: 84541 - RNA, 19 nt, Artificial Sequence
  Chemically synthesized
uaugggaguagggaggguu

SEQ ID NO: 84542 - RNA, 19 nt, Artificial Sequence
  Chemically synthesized
uucuaagaugccagcaucc

SEQ ID NO: 84543 - RNA, 19 nt, Artificial Sequence
  Chemically synthesized
ucugugcuccaugagguug

SEQ ID NO: 84544 - RNA, 19 nt, Artificial Sequence
  Chemically synthesized
uguuguaccacccaucaaa

SEQ ID NO: 84545 - RNA, 19 nt, Artificial Sequence
  Chemically synthesized
aucuucuuacagaacacuu

SEQ ID NO: 84546 - RNA, 19 nt, Artificial Sequence
  Chemically synthesized
uggguaucuggcacaucug

SEQ ID NO: 84547 - RNA, 19 nt, Artificial Sequence
  Chemically synthesized
uggaucagggcaaagcuac

SEQ ID NO: 84548 - RNA, 19 nt, Artificial Sequence
  Chemically synthesized
cuugccauuccaaagcuuc

SEQ ID NO: 84549 - RNA, 19 nt, Artificial Sequence
  Chemically synthesized
uugaggauggaggcaaaag

SEQ ID NO: 84550 - RNA, 19 nt, Artificial Sequence
  Chemically synthesized
uuguacucaaagcccuggg

SEQ ID NO: 84551 - RNA, 19 nt, Artificial Sequence
  Chemically synthesized
uggaaaugaggccauuccc

SEQ ID NO: 84552 - RNA, 19 nt, Artificial Sequence
  Chemically synthesized
agaaauggccgguauccug

SEQ ID NO: 84553 - RNA, 19 nt, Artificial Sequence
  Chemically synthesized
ucauacacagcgauguucu

SEQ ID NO: 84554 - RNA, 19 nt, Artificial Sequence
  Chemically synthesized
auagacuccgguucagaac

SEQ ID NO: 84555 - RNA, 19 nt, Artificial Sequence
  Chemically synthesized
ucaggagagccuuucauga

SEQ ID NO: 84556 - RNA, 19 nt, Artificial Sequence
  Chemically synthesized
uccuuuaugccagacaaag

SEQ ID NO: 84557 - RNA, 19 nt, Artificial Sequence
  Chemically synthesized
ucugugcgggaaaacuuca

SEQ ID NO: 84558 - RNA, 19 nt, Artificial Sequence
  Chemically synthesized
uugugguagcggaaccaga

SEQ ID NO: 84559 - RNA, 19 nt, Artificial Sequence
  Chemically synthesized
uaguugugguguuagacug

SEQ ID NO: 84560 - RNA, 19 nt, Artificial Sequence
  Chemically synthesized
uggguuucuguaaauggcu

SEQ ID NO: 84561 - RNA, 19 nt, Artificial Sequence
  Chemically synthesized
uccgguucagaaccuucug

SEQ ID NO: 84562 - RNA, 19 nt, Artificial Sequence
  Chemically synthesized
ucccguagccgcacaaauu

SEQ ID NO: 84563 - RNA, 19 nt, Artificial Sequence
  Chemically synthesized
gacacuugaguuccgauug

SEQ ID NO: 84564 - RNA, 19 nt, Artificial Sequence
  Chemically synthesized
aaaaccuugggugaaauua

SEQ ID NO: 84565 - RNA, 19 nt, Artificial Sequence
  Chemically synthesized
gugaaauuaguuguggugu

SEQ ID NO: 84566 - RNA, 19 nt, Artificial Sequence
  Chemically synthesized
acuccgguucagaaccuuc

SEQ ID NO: 84567 - RNA, 19 nt, Artificial Sequence
  Chemically synthesized
ucagggcaaagcuaccaug

SEQ ID NO: 84568 - RNA, 19 nt, Artificial Sequence
  Chemically synthesized
uaguaguaggcccucucca

SEQ ID NO: 84569 - RNA, 19 nt, Artificial Sequence
  Chemically synthesized
ucaccaggucugaaagcac

SEQ ID NO: 84570 - RNA, 19 nt, Artificial Sequence
  Chemically synthesized
auuuggaagggagacuacu

SEQ ID NO: 84571 - RNA, 19 nt, Artificial Sequence
  Chemically synthesized
ugagaugguguugcuaagg

SEQ ID NO: 84572 - RNA, 19 nt, Artificial Sequence
  Chemically synthesized
uaguacuugucaggucagc

SEQ ID NO: 84573 - RNA, 19 nt, Artificial Sequence
  Chemically synthesized
uucugaagucuggaagcag

SEQ ID NO: 84574 - RNA, 19 nt, Artificial Sequence
  Chemically synthesized
uagaugauugcugggacca

SEQ ID NO: 84575 - RNA, 19 nt, Artificial Sequence
  Chemically synthesized
cuggaaugacguuaccuuc

SEQ ID NO: 84576 - RNA, 19 nt, Artificial Sequence
  Chemically synthesized
auccugaugaacucauccu

SEQ ID NO: 84577 - RNA, 19 nt, Artificial Sequence
  Chemically synthesized
uccugaugaacucauccuu

SEQ ID NO: 84578 - RNA, 19 nt, Artificial Sequence
  Chemically synthesized
ucagccagagagaacaugg

SEQ ID NO: 84579 - RNA, 19 nt, Artificial Sequence
  Chemically synthesized
uccugcagggugguauuuc

SEQ ID NO: 84580 - RNA, 19 nt, Artificial Sequence
  Chemically synthesized
uucugguagguggcgauga

SEQ ID NO: 84581 - RNA, 19 nt, Artificial Sequence
  Chemically synthesized
aggagcauugcauacauag

SEQ ID NO: 84582 - RNA, 19 nt, Artificial Sequence
  Chemically synthesized
ugaaauuaguugugguguu

SEQ ID NO: 84583 - RNA, 19 nt, Artificial Sequence
  Chemically synthesized
uugaagaagggcucaaagg

SEQ ID NO: 84584 - RNA, 19 nt, Artificial Sequence
  Chemically synthesized
ugccgcucacagauguaca

SEQ ID NO: 84585 - RNA, 19 nt, Artificial Sequence
  Chemically synthesized
uguagaugugcacagacac

SEQ ID NO: 84586 - RNA, 19 nt, Artificial Sequence
  Chemically synthesized
augucaguuccuccuuguc

SEQ ID NO: 84587 - RNA, 19 nt, Artificial Sequence
  Chemically synthesized
uuuuccucaggagagccuu

SEQ ID NO: 84588 - RNA, 19 nt, Artificial Sequence
  Chemically synthesized
ccgcacaaauuguucaagg

SEQ ID NO: 84589 - RNA, 19 nt, Artificial Sequence
  Chemically synthesized
acgauggugcugaacagag

SEQ ID NO: 84590 - RNA, 19 nt, Artificial Sequence
  Chemically synthesized
uggucugugcgggaaaacu

SEQ ID NO: 84591 - RNA, 19 nt, Artificial Sequence
  Chemically synthesized
auccacaucuucagcacuu

SEQ ID NO: 84592 - RNA, 19 nt, Artificial Sequence
  Chemically synthesized
uucagcacuuuguaggcuu

SEQ ID NO: 84593 - RNA, 19 nt, Artificial Sequence
  Chemically synthesized
acugcauccuuacacucac

SEQ ID NO: 84594 - RNA, 19 nt, Artificial Sequence
  Chemically synthesized
ugcacacacauaguacuug

SEQ ID NO: 84595 - RNA, 19 nt, Artificial Sequence
  Chemically synthesized
ucccacuaacacugacacc

SEQ ID NO: 84596 - RNA, 19 nt, Artificial Sequence
  Chemically synthesized
augauggccaggaucagga

SEQ ID NO: 84597 - RNA, 19 nt, Artificial Sequence
  Chemically synthesized
uguaagacugugaggacga

SEQ ID NO: 84598 - RNA, 19 nt, Artificial Sequence
  Chemically synthesized
ucagugaacagcaagggcu

SEQ ID NO: 84599 - RNA, 19 nt, Artificial Sequence
  Chemically synthesized
acauaaggcgagacuuuuc

SEQ ID NO: 84600 - RNA, 19 nt, Artificial Sequence
  Chemically synthesized
guagccauugccauccuug

SEQ ID NO: 84601 - RNA, 19 nt, Artificial Sequence
  Chemically synthesized
aaaaggugccugaaaaagg

SEQ ID NO: 84602 - RNA, 19 nt, Artificial Sequence
  Chemically synthesized
ucuaccuccugcaaggcau

SEQ ID NO: 84603 - RNA, 19 nt, Artificial Sequence
  Chemically synthesized
uauggccaccuggaacaag

SEQ ID NO: 84604 - RNA, 19 nt, Artificial Sequence
  Chemically synthesized
uccaccucucggaugaugu

SEQ ID NO: 84605 - RNA, 19 nt, Artificial Sequence
  Chemically synthesized
ucucggaugaugucagcca

SEQ ID NO: 84606 - RNA, 19 nt, Artificial Sequence
  Chemically synthesized
acagcuuuggguaucuggc

SEQ ID NO: 84607 - RNA, 19 nt, Artificial Sequence
  Chemically synthesized
agacccaucaucauggaag

SEQ ID NO: 84608 - RNA, 19 nt, Artificial Sequence
  Chemically synthesized
ucaaugaagcgcuugaacu

SEQ ID NO: 84609 - RNA, 19 nt, Artificial Sequence
  Chemically synthesized
uagccauugccauccuugu

SEQ ID NO: 84610 - RNA, 19 nt, Artificial Sequence
  Chemically synthesized
auccacugcccucaaaaua

SEQ ID NO: 84611 - RNA, 19 nt, Artificial Sequence
  Chemically synthesized
accuugggugaaauuaguu

SEQ ID NO: 84612 - RNA, 19 nt, Artificial Sequence
  Chemically synthesized
acacauaguacuugucagg

SEQ ID NO: 84613 - RNA, 19 nt, Artificial Sequence
  Chemically synthesized
aguacuugucaggucagcu

SEQ ID NO: 84614 - RNA, 19 nt, Artificial Sequence
  Chemically synthesized
agaaguucucauaauggug

SEQ ID NO: 84615 - RNA, 19 nt, Artificial Sequence
  Chemically synthesized
auucuuggucaugccaggg

SEQ ID NO: 84616 - RNA, 19 nt, Artificial Sequence
  Chemically synthesized
uaucuggcacaucugucac

SEQ ID NO: 84617 - RNA, 19 nt, Artificial Sequence
  Chemically synthesized
uacaugauggccaggauca

SEQ ID NO: 84618 - RNA, 19 nt, Artificial Sequence
  Chemically synthesized
agaaccaccaguaauacuu

SEQ ID NO: 84619 - RNA, 19 nt, Artificial Sequence
  Chemically synthesized
ucugugaugcccgugugau

SEQ ID NO: 84620 - RNA, 19 nt, Artificial Sequence
  Chemically synthesized
ugaggugucaacucagucu

SEQ ID NO: 84621 - RNA, 19 nt, Artificial Sequence
  Chemically synthesized
aaaucuucccaugucaguu

SEQ ID NO: 84622 - RNA, 19 nt, Artificial Sequence
  Chemically synthesized
augcgaauguugaggaacu

SEQ ID NO: 84623 - RNA, 19 nt, Artificial Sequence
  Chemically synthesized
uacuggagcagggagaaga

SEQ ID NO: 84624 - RNA, 19 nt, Artificial Sequence
  Chemically synthesized
ucuaagaugccagcaucca

SEQ ID NO: 84625 - RNA, 19 nt, Artificial Sequence
  Chemically synthesized
cagacaugcacacacauag

SEQ ID NO: 84626 - RNA, 19 nt, Artificial Sequence
  Chemically synthesized
uuguuguaccacccaucaa

SEQ ID NO: 84627 - RNA, 19 nt, Artificial Sequence
  Chemically synthesized
uucagaaccuucuggaagu

SEQ ID NO: 84628 - RNA, 19 nt, Artificial Sequence
  Chemically synthesized
ugaugagcaggacauagag

SEQ ID NO: 84629 - RNA, 19 nt, Artificial Sequence
  Chemically synthesized
ugaggaagguuucucgcag

SEQ ID NO: 84630 - RNA, 19 nt, Artificial Sequence
  Chemically synthesized
guuggaacuucucucggug

SEQ ID NO: 84631 - RNA, 19 nt, Artificial Sequence
  Chemically synthesized
uucaugaagaccaccagga

SEQ ID NO: 84632 - RNA, 19 nt, Artificial Sequence
  Chemically synthesized
augaagaccaccaggaugu

SEQ ID NO: 84633 - RNA, 19 nt, Artificial Sequence
  Chemically synthesized
uugauaacagcgaccagca

SEQ ID NO: 84634 - RNA, 19 nt, Artificial Sequence
  Chemically synthesized
agaaaucccgcacaucuuc

SEQ ID NO: 84635 - RNA, 19 nt, Artificial Sequence
  Chemically synthesized
aaauuaguugugguguuag

SEQ ID NO: 84636 - RNA, 19 nt, Artificial Sequence
  Chemically synthesized
uugucaggucagcuugucu

SEQ ID NO: 84637 - RNA, 19 nt, Artificial Sequence
  Chemically synthesized
uccugguggucauucuccu

SEQ ID NO: 84638 - RNA, 19 nt, Artificial Sequence
  Chemically synthesized
ucagccagccacucaaacu

SEQ ID NO: 84639 - RNA, 19 nt, Artificial Sequence
  Chemically synthesized
augauugcugggaccagga

SEQ ID NO: 84640 - RNA, 19 nt, Artificial Sequence
  Chemically synthesized
aacagguacacauucacca

SEQ ID NO: 84641 - RNA, 19 nt, Artificial Sequence
  Chemically synthesized
gucaguuccuccuuguccu

SEQ ID NO: 84642 - RNA, 19 nt, Artificial Sequence
  Chemically synthesized
ucgaugaaggaucucagca

SEQ ID NO: 84643 - RNA, 19 nt, Artificial Sequence
  Chemically synthesized
uggccuugccauuccaaag

SEQ ID NO: 84644 - RNA, 19 nt, Artificial Sequence
  Chemically synthesized
cuucucagacacgaugcuc

SEQ ID NO: 84645 - RNA, 19 nt, Artificial Sequence
  Chemically synthesized
ucucagacacgaugcucug

SEQ ID NO: 84646 - RNA, 19 nt, Artificial Sequence
  Chemically synthesized
uucaaucuccuucuuggag

SEQ ID NO: 84647 - RNA, 19 nt, Artificial Sequence
  Chemically synthesized
ccagaaaucccgcacaucu

SEQ ID NO: 84648 - RNA, 19 nt, Artificial Sequence
  Chemically synthesized
uauugggccagggucugau

SEQ ID NO: 84649 - RNA, 19 nt, Artificial Sequence
  Chemically synthesized
aacacacauacagacaugc

SEQ ID NO: 84650 - RNA, 19 nt, Artificial Sequence
  Chemically synthesized
ucgaacuucucagccagcu

SEQ ID NO: 84651 - RNA, 19 nt, Artificial Sequence
  Chemically synthesized
uggucauucuccuccaccu

SEQ ID NO: 84652 - RNA, 19 nt, Artificial Sequence
  Chemically synthesized
auggcccacacuguguaag

SEQ ID NO: 84653 - RNA, 19 nt, Artificial Sequence
  Chemically synthesized
augacuucaggcaccucca

SEQ ID NO: 84654 - RNA, 19 nt, Artificial Sequence
  Chemically synthesized
cuuggaaaugaggccauuc

SEQ ID NO: 84655 - RNA, 19 nt, Artificial Sequence
  Chemically synthesized
guacaugcggaacauaagg

SEQ ID NO: 84656 - RNA, 19 nt, Artificial Sequence
  Chemically synthesized
cucaggagagccuuucaug

SEQ ID NO: 84657 - RNA, 19 nt, Artificial Sequence
  Chemically synthesized
ucuccuuuaugccagacaa

SEQ ID NO: 84658 - RNA, 19 nt, Artificial Sequence
  Chemically synthesized
gucugugcgggaaaacuuc

SEQ ID NO: 84659 - RNA, 19 nt, Artificial Sequence
  Chemically synthesized
auggccgguauccuguaua

SEQ ID NO: 84660 - RNA, 19 nt, Artificial Sequence
  Chemically synthesized
uccgggaguguuuucugca

SEQ ID NO: 84661 - RNA, 19 nt, Artificial Sequence
  Chemically synthesized
acacauacagacaugcaca

SEQ ID NO: 84662 - RNA, 19 nt, Artificial Sequence
  Chemically synthesized
acaugcacacacauaguac

SEQ ID NO: 84663 - RNA, 19 nt, Artificial Sequence
  Chemically synthesized
ucucacucuagucccuaga

SEQ ID NO: 84664 - RNA, 19 nt, Artificial Sequence
  Chemically synthesized
augaugucagccagccacu

SEQ ID NO: 84665 - RNA, 19 nt, Artificial Sequence
  Chemically synthesized
acuuguacucaaagcccug

SEQ ID NO: 84666 - RNA, 19 nt, Artificial Sequence
  Chemically synthesized
ucuggaagaaccaccagua

SEQ ID NO: 84667 - RNA, 19 nt, Artificial Sequence
  Chemically synthesized
auccuugucagccagagag

SEQ ID NO: 84668 - RNA, 19 nt, Artificial Sequence
  Chemically synthesized
caguacagugucauugcuc

SEQ ID NO: 84669 - RNA, 19 nt, Artificial Sequence
  Chemically synthesized
aaucccgcacaucuucaac

SEQ ID NO: 84670 - RNA, 19 nt, Artificial Sequence
  Chemically synthesized
aggaaugcgaggaaccaua

SEQ ID NO: 84671 - RNA, 19 nt, Artificial Sequence
  Chemically synthesized
ugaaagaacgugcuuaaaa

SEQ ID NO: 84672 - RNA, 19 nt, Artificial Sequence
  Chemically synthesized
uucuccaggcugagacaca

SEQ ID NO: 84673 - RNA, 19 nt, Artificial Sequence
  Chemically synthesized
acauucuuggucaugccag

SEQ ID NO: 84674 - RNA, 19 nt, Artificial Sequence
  Chemically synthesized
uccaucaagguacagcuuu

SEQ ID NO: 84675 - RNA, 19 nt, Artificial Sequence
  Chemically synthesized
cucagcauccugaugaacu

SEQ ID NO: 84676 - RNA, 19 nt, Artificial Sequence
  Chemically synthesized
gucacagcugcucucauca

SEQ ID NO: 84677 - RNA, 19 nt, Artificial Sequence
  Chemically synthesized
ucacagcugcucucaucag

SEQ ID NO: 84678 - RNA, 19 nt, Artificial Sequence
  Chemically synthesized
aucccguagccgcacaaau

SEQ ID NO: 84679 - RNA, 19 nt, Artificial Sequence
  Chemically synthesized
aagaggaggagguauggga

SEQ ID NO: 84680 - RNA, 19 nt, Artificial Sequence
  Chemically synthesized
ugagauuuguuucugaagu

SEQ ID NO: 84681 - RNA, 19 nt, Artificial Sequence
  Chemically synthesized
ucacucuagucccuagaca

SEQ ID NO: 84682 - RNA, 19 nt, Artificial Sequence
  Chemically synthesized
acuauggccaccuggaaca

SEQ ID NO: 84683 - RNA, 19 nt, Artificial Sequence
  Chemically synthesized
ugguacggucuggaagaac

SEQ ID NO: 84684 - RNA, 19 nt, Artificial Sequence
  Chemically synthesized
aaaugaggccauucccauc

SEQ ID NO: 84685 - RNA, 19 nt, Artificial Sequence
  Chemically synthesized
ucguacaugcggaacauaa

SEQ ID NO: 84686 - RNA, 19 nt, Artificial Sequence
  Chemically synthesized
aggauguccaggaacucuc

SEQ ID NO: 84687 - RNA, 19 nt, Artificial Sequence
  Chemically synthesized
ugaaauuucucauccggag

SEQ ID NO: 84688 - RNA, 19 nt, Artificial Sequence
  Chemically synthesized
aagccaaauccacugcccu

SEQ ID NO: 84689 - RNA, 19 nt, Artificial Sequence
  Chemically synthesized
uggaagggagacuacugga

SEQ ID NO: 84690 - RNA, 19 nt, Artificial Sequence
  Chemically synthesized
auagguauugggccagggu

SEQ ID NO: 84691 - RNA, 19 nt, Artificial Sequence
  Chemically synthesized
uuaaaaccuugggugaaau

SEQ ID NO: 84692 - RNA, 19 nt, Artificial Sequence
  Chemically synthesized
ggugaaauuaguuguggug

SEQ ID NO: 84693 - RNA, 19 nt, Artificial Sequence
  Chemically synthesized
aaauggcuugccauggguc

SEQ ID NO: 84694 - RNA, 19 nt, Artificial Sequence
  Chemically synthesized
uccugcaaggcauuugcca

SEQ ID NO: 84695 - RNA, 19 nt, Artificial Sequence
  Chemically synthesized
cugacaggccuuuuccaca

SEQ ID NO: 84696 - RNA, 19 nt, Artificial Sequence
  Chemically synthesized
acaggccuuuuccacauuc

SEQ ID NO: 84697 - RNA, 19 nt, Artificial Sequence
  Chemically synthesized
acagauguacagcauagug

SEQ ID NO: 84698 - RNA, 19 nt, Artificial Sequence
  Chemically synthesized
uccugaggucgaacuucuc

SEQ ID NO: 84699 - RNA, 19 nt, Artificial Sequence
  Chemically synthesized
augucagccagccacucaa

SEQ ID NO: 84700 - RNA, 19 nt, Artificial Sequence
  Chemically synthesized
cuugaacuguugcaccguc

SEQ ID NO: 84701 - RNA, 19 nt, Artificial Sequence
  Chemically synthesized
aacagcaagggcuggaaug

SEQ ID NO: 84702 - RNA, 19 nt, Artificial Sequence
  Chemically synthesized
cucagucucaaugucgcug

SEQ ID NO: 84703 - RNA, 19 nt, Artificial Sequence
  Chemically synthesized
uccuccuuguccuggaauc

SEQ ID NO: 84704 - RNA, 19 nt, Artificial Sequence
  Chemically synthesized
aacauggacuccaccaccu

SEQ ID NO: 84705 - RNA, 19 nt, Artificial Sequence
  Chemically synthesized
aacauaaggcgagacuuuu

SEQ ID NO: 84706 - RNA, 19 nt, Artificial Sequence
  Chemically synthesized
caaguuaaacagcagcacc

SEQ ID NO: 84707 - RNA, 19 nt, Artificial Sequence
  Chemically synthesized
cagugcauccacaucuuca

SEQ ID NO: 84708 - RNA, 19 nt, Artificial Sequence
  Chemically synthesized
uccaguagcuguugcagac

SEQ ID NO: 84709 - RNA, 19 nt, Artificial Sequence
  Chemically synthesized
ugaaagcacgugauagcca

SEQ ID NO: 84710 - RNA, 19 nt, Artificial Sequence
  Chemically synthesized
acacugugcgguuucucag

SEQ ID NO: 84711 - RNA, 19 nt, Artificial Sequence
  Chemically synthesized
aagaugccagcauccaugc

SEQ ID NO: 84712 - RNA, 19 nt, Artificial Sequence
  Chemically synthesized
auaguacuugucaggucag

SEQ ID NO: 84713 - RNA, 19 nt, Artificial Sequence
  Chemically synthesized
ucugaagucuggaagcaga

SEQ ID NO: 84714 - RNA, 19 nt, Artificial Sequence
  Chemically synthesized
ugaagucuggaagcagagg

SEQ ID NO: 84715 - RNA, 19 nt, Artificial Sequence
  Chemically synthesized
ugggaggugggaaaucaga

SEQ ID NO: 84716 - RNA, 19 nt, Artificial Sequence
  Chemically synthesized
guuguuguaccacccauca

SEQ ID NO: 84717 - RNA, 19 nt, Artificial Sequence
  Chemically synthesized
augagcugacaggccuuuu

SEQ ID NO: 84718 - RNA, 19 nt, Artificial Sequence
  Chemically synthesized
ugggaggcaaagacauaca

SEQ ID NO: 84719 - RNA, 19 nt, Artificial Sequence
  Chemically synthesized
agugaaaaucuucccaugu

SEQ ID NO: 84720 - RNA, 19 nt, Artificial Sequence
  Chemically synthesized
ccugaugaacucauccuug

SEQ ID NO: 84721 - RNA, 19 nt, Artificial Sequence
  Chemically synthesized
uuuccucaggagagccuuu

SEQ ID NO: 84722 - RNA, 19 nt, Artificial Sequence
  Chemically synthesized
ucuagccaggauaaguccu

SEQ ID NO: 84723 - RNA, 19 nt, Artificial Sequence
  Chemically synthesized
ucuucagcacuuuguaggc

SEQ ID NO: 84724 - RNA, 19 nt, Artificial Sequence
  Chemically synthesized
ucaggucagcuugucuucu

SEQ ID NO: 84725 - RNA, 19 nt, Artificial Sequence
  Chemically synthesized
agcauagugguccugaggu

SEQ ID NO: 84726 - RNA, 19 nt, Artificial Sequence
  Chemically synthesized
ccaaccagaaguguccaug

SEQ ID NO: 84727 - RNA, 19 nt, Artificial Sequence
  Chemically synthesized
auugcugggaccaggaaga

SEQ ID NO: 84728 - RNA, 19 nt, Artificial Sequence
  Chemically synthesized
uggagaacagguacacauu

SEQ ID NO: 84729 - RNA, 19 nt, Artificial Sequence
  Chemically synthesized
uguguaagacugugaggac

SEQ ID NO: 84730 - RNA, 19 nt, Artificial Sequence
  Chemically synthesized
agcugcguuggaacuucuc

SEQ ID NO: 84731 - RNA, 19 nt, Artificial Sequence
  Chemically synthesized
ucucugaggugucaacuca

SEQ ID NO: 84732 - RNA, 19 nt, Artificial Sequence
  Chemically synthesized
aaaaucuucccaugucagu

SEQ ID NO: 84733 - RNA, 19 nt, Artificial Sequence
  Chemically synthesized
ucuucccaugucaguuccu

SEQ ID NO: 84734 - RNA, 19 nt, Artificial Sequence
  Chemically synthesized
ugguugauguccagcaccu

SEQ ID NO: 84735 - RNA, 19 nt, Artificial Sequence
  Chemically synthesized
aaauccacugcccucaaaa

SEQ ID NO: 84736 - RNA, 19 nt, Artificial Sequence
  Chemically synthesized
ucuuggagaacagcccauu

SEQ ID NO: 84737 - RNA, 19 nt, Artificial Sequence
  Chemically synthesized
guugugguguuagacuggg

SEQ ID NO: 84738 - RNA, 19 nt, Artificial Sequence
  Chemically synthesized
aagcagagguuucacuuug

SEQ ID NO: 84739 - RNA, 19 nt, Artificial Sequence
  Chemically synthesized
cuucucacucuagucccua

SEQ ID NO: 84740 - RNA, 19 nt, Artificial Sequence
  Chemically synthesized
aagaacagaggugaggugu

SEQ ID NO: 84741 - RNA, 19 nt, Artificial Sequence
  Chemically synthesized
cucaaaccucugcucaacu

SEQ ID NO: 84742 - RNA, 19 nt, Artificial Sequence
  Chemically synthesized
accacccaucaaaucgcug

SEQ ID NO: 84743 - RNA, 19 nt, Artificial Sequence
  Chemically synthesized
caucaaaucgcugcaccuc

SEQ ID NO: 84744 - RNA, 19 nt, Artificial Sequence
  Chemically synthesized
cuuacagaacacuuggcag

SEQ ID NO: 84745 - RNA, 19 nt, Artificial Sequence
  Chemically synthesized
cccacuaacacugacaccu

SEQ ID NO: 84746 - RNA, 19 nt, Artificial Sequence
  Chemically synthesized
acugacaccucaaacuuau

SEQ ID NO: 84747 - RNA, 19 nt, Artificial Sequence
  Chemically synthesized
cuccaaaugguccaucaag

SEQ ID NO: 84748 - RNA, 19 nt, Artificial Sequence
  Chemically synthesized
uggugggaggcaaagacau

SEQ ID NO: 84749 - RNA, 19 nt, Artificial Sequence
  Chemically synthesized
aagguuucucgcaggaagg

SEQ ID NO: 84750 - RNA, 19 nt, Artificial Sequence
  Chemically synthesized
ucagcauccugaugaacuc

SEQ ID NO: 84751 - RNA, 19 nt, Artificial Sequence
  Chemically synthesized
uccucaggagagccuuuca

SEQ ID NO: 84752 - RNA, 19 nt, Artificial Sequence
  Chemically synthesized
acagguagccauugccauc

SEQ ID NO: 84753 - RNA, 19 nt, Artificial Sequence
  Chemically synthesized
cucaaaauagucacgaaca

SEQ ID NO: 84754 - RNA, 19 nt, Artificial Sequence
  Chemically synthesized
uccagaaauggccgguauc

SEQ ID NO: 84755 - RNA, 19 nt, Artificial Sequence
  Chemically synthesized
ugcgaauguugaggaacuc

SEQ ID NO: 84756 - RNA, 19 nt, Artificial Sequence
  Chemically synthesized
cauacagacaugcacacac

SEQ ID NO: 84757 - RNA, 19 nt, Artificial Sequence
  Chemically synthesized
augcacacacauaguacuu

SEQ ID NO: 84758 - RNA, 19 nt, Artificial Sequence
  Chemically synthesized
auggaugaugagcaggaca

SEQ ID NO: 84759 - RNA, 19 nt, Artificial Sequence
  Chemically synthesized
augagcaggacauagagca

SEQ ID NO: 84760 - RNA, 19 nt, Artificial Sequence
  Chemically synthesized
acuguguaagacugugagg

SEQ ID NO: 84761 - RNA, 19 nt, Artificial Sequence
  Chemically synthesized
agcgguugaggaagguuuc

SEQ ID NO: 84762 - RNA, 19 nt, Artificial Sequence
  Chemically synthesized
acagcugcucucaucagcu

SEQ ID NO: 84763 - RNA, 19 nt, Artificial Sequence
  Chemically synthesized
ugcagggugguauuucgga

SEQ ID NO: 84764 - RNA, 19 nt, Artificial Sequence
  Chemically synthesized
cacaucuucaaccaacaca

SEQ ID NO: 84765 - RNA, 19 nt, Artificial Sequence
  Chemically synthesized
ucagcacuuuguaggcuug

SEQ ID NO: 84766 - RNA, 19 nt, Artificial Sequence
  Chemically synthesized
gaaauggccgguauccugu

SEQ ID NO: 84767 - RNA, 19 nt, Artificial Sequence
  Chemically synthesized
gucugaaagcacgugauag

SEQ ID NO: 84768 - RNA, 19 nt, Artificial Sequence
  Chemically synthesized
cagagguuucacuuugccc

SEQ ID NO: 84769 - RNA, 19 nt, Artificial Sequence
  Chemically synthesized
ucuagucccuagacacugc

SEQ ID NO: 84770 - RNA, 19 nt, Artificial Sequence
  Chemically synthesized
uaggaagaacagaggugag

SEQ ID NO: 84771 - RNA, 19 nt, Artificial Sequence
  Chemically synthesized
aauagacuccgguucagaa

SEQ ID NO: 84772 - RNA, 19 nt, Artificial Sequence
  Chemically synthesized
caaacuuaugccacuccug

SEQ ID NO: 84773 - RNA, 19 nt, Artificial Sequence
  Chemically synthesized
aagcccaugaugaaaauaa

SEQ ID NO: 84774 - RNA, 19 nt, Artificial Sequence
  Chemically synthesized
uggaugaugagcaggacau

SEQ ID NO: 84775 - RNA, 19 nt, Artificial Sequence
  Chemically synthesized
uucucgcaggaaggugaug

SEQ ID NO: 84776 - RNA, 19 nt, Artificial Sequence
  Chemically synthesized
agucucugaggugucaacu

SEQ ID NO: 84777 - RNA, 19 nt, Artificial Sequence
  Chemically synthesized
cugaggugucaacucaguc

SEQ ID NO: 84778 - RNA, 19 nt, Artificial Sequence
  Chemically synthesized
cauccugaugaacucaucc

SEQ ID NO: 84779 - RNA, 19 nt, Artificial Sequence
  Chemically synthesized
agagccuuucaugaagacc

SEQ ID NO: 84780 - RNA, 19 nt, Artificial Sequence
  Chemically synthesized
ugccugaaaaaggucucca

SEQ ID NO: 84781 - RNA, 19 nt, Artificial Sequence
  Chemically synthesized
gguauuucggauuucuuca

SEQ ID NO: 84782 - RNA, 19 nt, Artificial Sequence
  Chemically synthesized
accaggucugaaagcacgu

SEQ ID NO: 84783 - RNA, 19 nt, Artificial Sequence
  Chemically synthesized
ugagacacauccugguccu

SEQ ID NO: 84784 - RNA, 19 nt, Artificial Sequence
  Chemically synthesized
aggaagaacagaggugagg

SEQ ID NO: 84785 - RNA, 19 nt, Artificial Sequence
  Chemically synthesized
ugaugagcugacaggccuu

SEQ ID NO: 84786 - RNA, 19 nt, Artificial Sequence
  Chemically synthesized
caggccugugaauagacuc

SEQ ID NO: 84787 - RNA, 19 nt, Artificial Sequence
  Chemically synthesized
acgcugaucuccaccuucu

SEQ ID NO: 84788 - RNA, 19 nt, Artificial Sequence
  Chemically synthesized
ucaguuccuccuuguccug

SEQ ID NO: 84789 - RNA, 19 nt, Artificial Sequence
  Chemically synthesized
uuccuccuuguccuggaau

SEQ ID NO: 84790 - RNA, 19 nt, Artificial Sequence
  Chemically synthesized
ccucaaaauagucacgaac

SEQ ID NO: 84791 - RNA, 19 nt, Artificial Sequence
  Chemically synthesized
aaagacauugggcugcaga

SEQ ID NO: 84792 - RNA, 19 nt, Artificial Sequence
  Chemically synthesized
aagacauugggcugcagag

SEQ ID NO: 84793 - RNA, 19 nt, Artificial Sequence
  Chemically synthesized
acaucuucaaccaacacau

SEQ ID NO: 84794 - RNA, 19 nt, Artificial Sequence
  Chemically synthesized
acgugauagccaaagaaga

SEQ ID NO: 84795 - RNA, 19 nt, Artificial Sequence
  Chemically synthesized
cugaggagcauugcauaca

SEQ ID NO: 84796 - RNA, 19 nt, Artificial Sequence
  Chemically synthesized
ugaggagcauugcauacau

SEQ ID NO: 84797 - RNA, 19 nt, Artificial Sequence
  Chemically synthesized
cagaagaggaggagguaug

SEQ ID NO: 84798 - RNA, 19 nt, Artificial Sequence
  Chemically synthesized
cauaguacuugucagguca

SEQ ID NO: 84799 - RNA, 19 nt, Artificial Sequence
  Chemically synthesized
ccuacuucucacucuaguc

SEQ ID NO: 84800 - RNA, 19 nt, Artificial Sequence
  Chemically synthesized
uggaacaagguugggaggu

SEQ ID NO: 84801 - RNA, 19 nt, Artificial Sequence
  Chemically synthesized
ccuagaaguucucauaaug

SEQ ID NO: 84802 - RNA, 19 nt, Artificial Sequence
  Chemically synthesized
uccugccuguugaugagcu

SEQ ID NO: 84803 - RNA, 19 nt, Artificial Sequence
  Chemically synthesized
ugacaggccuuuuccacau

SEQ ID NO: 84804 - RNA, 19 nt, Artificial Sequence
  Chemically synthesized
gucauucuccuccaccucu

SEQ ID NO: 84805 - RNA, 19 nt, Artificial Sequence
  Chemically synthesized
acuaacacugacaccucaa

SEQ ID NO: 84806 - RNA, 19 nt, Artificial Sequence
  Chemically synthesized
ugggaccaggaagaagaug

SEQ ID NO: 84807 - RNA, 19 nt, Artificial Sequence
  Chemically synthesized
caggacauagagcaggaug

SEQ ID NO: 84808 - RNA, 19 nt, Artificial Sequence
  Chemically synthesized
caaugaagcgcuugaacug

SEQ ID NO: 84809 - RNA, 19 nt, Artificial Sequence
  Chemically synthesized
acagaucauauccuggcug

SEQ ID NO: 84810 - RNA, 19 nt, Artificial Sequence
  Chemically synthesized
cuugaugacuucaggcacc

SEQ ID NO: 84811 - RNA, 19 nt, Artificial Sequence
  Chemically synthesized
ugaagcggagcucgcuauu

SEQ ID NO: 84812 - RNA, 19 nt, Artificial Sequence
  Chemically synthesized
ucccgcagcaugaagugaa

SEQ ID NO: 84813 - RNA, 19 nt, Artificial Sequence
  Chemically synthesized
ccuuucaugaagaccacca

SEQ ID NO: 84814 - RNA, 19 nt, Artificial Sequence
  Chemically synthesized
gugguauuucggauuucuu

SEQ ID NO: 84815 - RNA, 19 nt, Artificial Sequence
  Chemically synthesized
ccgcacaucuucaaccaac

SEQ ID NO: 84816 - RNA, 19 nt, Artificial Sequence
  Chemically synthesized
uccacaucuucagcacuuu

SEQ ID NO: 84817 - RNA, 19 nt, Artificial Sequence
  Chemically synthesized
agaagaggaggagguaugg

SEQ ID NO: 84818 - RNA, 19 nt, Artificial Sequence
  Chemically synthesized
cugcauccuuacacucacc

SEQ ID NO: 84819 - RNA, 19 nt, Artificial Sequence
  Chemically synthesized
cacacauacagacaugcac

SEQ ID NO: 84820 - RNA, 19 nt, Artificial Sequence
  Chemically synthesized
ucagcuugucuucugagau

SEQ ID NO: 84821 - RNA, 19 nt, Artificial Sequence
  Chemically synthesized
uggaagcagagguuucacu

SEQ ID NO: 84822 - RNA, 19 nt, Artificial Sequence
  Chemically synthesized
ucauaauggugggagaagu

SEQ ID NO: 84823 - RNA, 19 nt, Artificial Sequence
  Chemically synthesized
cugaggucgaacuucucag

SEQ ID NO: 84824 - RNA, 19 nt, Artificial Sequence
  Chemically synthesized
cucccacuaacacugacac

SEQ ID NO: 84825 - RNA, 19 nt, Artificial Sequence
  Chemically synthesized
ugcccugacuuguacucaa

SEQ ID NO: 84826 - RNA, 19 nt, Artificial Sequence
  Chemically synthesized
gugagcaagauguaggaga

SEQ ID NO: 84827 - RNA, 19 nt, Artificial Sequence
  Chemically synthesized
acuuuuccucaggagagcc

SEQ ID NO: 84828 - RNA, 19 nt, Artificial Sequence
  Chemically synthesized
aggugccugaaaaaggucu

SEQ ID NO: 84829 - RNA, 19 nt, Artificial Sequence
  Chemically synthesized
agcagcaccaggucauacu

SEQ ID NO: 84830 - RNA, 19 nt, Artificial Sequence
  Chemically synthesized
gaucuugagcagcagagug

SEQ ID NO: 84831 - RNA, 19 nt, Artificial Sequence
  Chemically synthesized
ucaaucuccuucuuggaga

SEQ ID NO: 84832 - RNA, 19 nt, Artificial Sequence
  Chemically synthesized
cuuggagaacagcccauuc

SEQ ID NO: 84833 - RNA, 19 nt, Artificial Sequence
  Chemically synthesized
uggagaacagcccauuccu

SEQ ID NO: 84834 - RNA, 19 nt, Artificial Sequence
  Chemically synthesized
agcagcucuagccaggaua

SEQ ID NO: 84835 - RNA, 19 nt, Artificial Sequence
  Chemically synthesized
agugcauccacaucuucag

SEQ ID NO: 84836 - RNA, 19 nt, Artificial Sequence
  Chemically synthesized
gaugguguugcuaaggucu

SEQ ID NO: 84837 - RNA, 19 nt, Artificial Sequence
  Chemically synthesized
ugccgaguggguuucugua

SEQ ID NO: 84838 - RNA, 19 nt, Artificial Sequence
  Chemically synthesized
acucuagucccuagacacu

SEQ ID NO: 84839 - RNA, 19 nt, Artificial Sequence
  Chemically synthesized
uccugcagggaguugaaga

SEQ ID NO: 84840 - RNA, 19 nt, Artificial Sequence
  Chemically synthesized
acacugacaccucaaacuu

SEQ ID NO: 84841 - RNA, 19 nt, Artificial Sequence
  Chemically synthesized
gaugaugagcaggacauag

SEQ ID NO: 84842 - RNA, 19 nt, Artificial Sequence
  Chemically synthesized
uacggucuggaagaaccac

SEQ ID NO: 84843 - RNA, 19 nt, Artificial Sequence
  Chemically synthesized
acagguacacauucaccac

SEQ ID NO: 84844 - RNA, 19 nt, Artificial Sequence
  Chemically synthesized
uggcccacacuguguaaga

SEQ ID NO: 84845 - RNA, 19 nt, Artificial Sequence
  Chemically synthesized
guuaaacagcagcaccagg

SEQ ID NO: 84846 - RNA, 19 nt, Artificial Sequence
  Chemically synthesized
uggacaggacgaaguugac

SEQ ID NO: 84847 - RNA, 19 nt, Artificial Sequence
  Chemically synthesized
uccuuguggccuugccauu

SEQ ID NO: 84848 - RNA, 19 nt, Artificial Sequence
  Chemically synthesized
ucaccaaagggaagcaaca

SEQ ID NO: 84849 - RNA, 19 nt, Artificial Sequence
  Chemically synthesized
accuccugcaaggcauuug

SEQ ID NO: 84850 - RNA, 19 nt, Artificial Sequence
  Chemically synthesized
cacugcauccuuacacuca

SEQ ID NO: 84851 - RNA, 19 nt, Artificial Sequence
  Chemically synthesized
ucuggaagcagagguuuca

SEQ ID NO: 84852 - RNA, 19 nt, Artificial Sequence
  Chemically synthesized
ugguggucauucuccucca

SEQ ID NO: 84853 - RNA, 19 nt, Artificial Sequence
  Chemically synthesized
agaaguguccaugcuagag

SEQ ID NO: 84854 - RNA, 19 nt, Artificial Sequence
  Chemically synthesized
aggaucaggagcagcacaa

SEQ ID NO: 84855 - RNA, 19 nt, Artificial Sequence
  Chemically synthesized
gcugcguuggaacuucucu

SEQ ID NO: 84856 - RNA, 19 nt, Artificial Sequence
  Chemically synthesized
gcuggaaugacguuaccuu

SEQ ID NO: 84857 - RNA, 19 nt, Artificial Sequence
  Chemically synthesized
ucugaggugucaacucagu

SEQ ID NO: 84858 - RNA, 19 nt, Artificial Sequence
  Chemically synthesized
augaacucauccuuggaaa

SEQ ID NO: 84859 - RNA, 19 nt, Artificial Sequence
  Chemically synthesized
agccauugccauccuuguc

SEQ ID NO: 84860 - RNA, 19 nt, Artificial Sequence
  Chemically synthesized
aguuaaacagcagcaccag

SEQ ID NO: 84861 - RNA, 19 nt, Artificial Sequence
  Chemically synthesized
aaaccaguagcggucacca

SEQ ID NO: 84862 - RNA, 19 nt, Artificial Sequence
  Chemically synthesized
agccgcacaaauuguucaa

SEQ ID NO: 84863 - RNA, 19 nt, Artificial Sequence
  Chemically synthesized
aaugggagacaagcccagu

SEQ ID NO: 84864 - RNA, 19 nt, Artificial Sequence
  Chemically synthesized
ccacaucuucagcacuuug

SEQ ID NO: 84865 - RNA, 19 nt, Artificial Sequence
  Chemically synthesized
aguggcagcuggcauuucu

SEQ ID NO: 84866 - RNA, 19 nt, Artificial Sequence
  Chemically synthesized
uggcagcuggcauuucuca

SEQ ID NO: 84867 - RNA, 19 nt, Artificial Sequence
  Chemically synthesized
aguugugguguuagacugg

SEQ ID NO: 84868 - RNA, 19 nt, Artificial Sequence
  Chemically synthesized
uaccuccugcaaggcauuu

SEQ ID NO: 84869 - RNA, 19 nt, Artificial Sequence
  Chemically synthesized
cucuagucccuagacacug

SEQ ID NO: 84870 - RNA, 19 nt, Artificial Sequence
  Chemically synthesized
accauuucuccaggcugag

SEQ ID NO: 84871 - RNA, 19 nt, Artificial Sequence
  Chemically synthesized
uuugaggauggaggcaaaa

SEQ ID NO: 84872 - RNA, 19 nt, Artificial Sequence
  Chemically synthesized
cugcccugacuuguacuca

SEQ ID NO: 84873 - RNA, 19 nt, Artificial Sequence
  Chemically synthesized
auggaagaggccaggaaag

SEQ ID NO: 84874 - RNA, 19 nt, Artificial Sequence
  Chemically synthesized
agcaagauguaggagaaca

SEQ ID NO: 84875 - RNA, 19 nt, Artificial Sequence
  Chemically synthesized
cucugaggugucaacucag

SEQ ID NO: 84876 - RNA, 19 nt, Artificial Sequence
  Chemically synthesized
acucagucucaaugucgcu

SEQ ID NO: 84877 - RNA, 19 nt, Artificial Sequence
  Chemically synthesized
ugggagagggacagaucau

SEQ ID NO: 84878 - RNA, 19 nt, Artificial Sequence
  Chemically synthesized
agguccuugaugacuucag

SEQ ID NO: 84879 - RNA, 19 nt, Artificial Sequence
  Chemically synthesized
guccuugaugacuucaggc

SEQ ID NO: 84880 - RNA, 19 nt, Artificial Sequence
  Chemically synthesized
ccaugucaguuccuccuug

SEQ ID NO: 84881 - RNA, 19 nt, Artificial Sequence
  Chemically synthesized
cucgaugaaggaucucagc

SEQ ID NO: 84882 - RNA, 19 nt, Artificial Sequence
  Chemically synthesized
cucuuccuccaaguuaaac

SEQ ID NO: 84883 - RNA, 19 nt, Artificial Sequence
  Chemically synthesized
ccucuugaaauuucucauc

SEQ ID NO: 84884 - RNA, 19 nt, Artificial Sequence
  Chemically synthesized
aauagucacgaacaacaga

SEQ ID NO: 84885 - RNA, 19 nt, Artificial Sequence
  Chemically synthesized
uucuuggagaacagcccau

SEQ ID NO: 84886 - RNA, 19 nt, Artificial Sequence
  Chemically synthesized
aggacgauggugcugaaca

SEQ ID NO: 84887 - RNA, 19 nt, Artificial Sequence
  Chemically synthesized
gauaaguccugguuguaca

SEQ ID NO: 84888 - RNA, 19 nt, Artificial Sequence
  Chemically synthesized
uguuuucugcaggaagcug

SEQ ID NO: 84889 - RNA, 19 nt, Artificial Sequence
  Chemically synthesized
cugaaagcacgugauagcc

SEQ ID NO: 84890 - RNA, 19 nt, Artificial Sequence
  Chemically synthesized
uaaaaccuugggugaaauu

SEQ ID NO: 84891 - RNA, 19 nt, Artificial Sequence
  Chemically synthesized
cuaagaugccagcauccau

SEQ ID NO: 84892 - RNA, 19 nt, Artificial Sequence
  Chemically synthesized
cacucuagucccuagacac

SEQ ID NO: 84893 - RNA, 19 nt, Artificial Sequence
  Chemically synthesized
agaacagaggugaggugug

SEQ ID NO: 84894 - RNA, 19 nt, Artificial Sequence
  Chemically synthesized
cauaauggugggagaagug

SEQ ID NO: 84895 - RNA, 19 nt, Artificial Sequence
  Chemically synthesized
ugaggucgaacuucucagc

SEQ ID NO: 84896 - RNA, 19 nt, Artificial Sequence
  Chemically synthesized
gacggaugacuugaagacc

SEQ ID NO: 84897 - RNA, 19 nt, Artificial Sequence
  Chemically synthesized
cuugaagaccaggucuuug

SEQ ID NO: 84898 - RNA, 19 nt, Artificial Sequence
  Chemically synthesized
ccucaaacuuaugccacuc

SEQ ID NO: 84899 - RNA, 19 nt, Artificial Sequence
  Chemically synthesized
aagaaccaccaguaauacu

SEQ ID NO: 84900 - RNA, 19 nt, Artificial Sequence
  Chemically synthesized
cgguaguucucaaugaagc

SEQ ID NO: 84901 - RNA, 19 nt, Artificial Sequence
  Chemically synthesized
ugcagucucugagguguca

SEQ ID NO: 84902 - RNA, 19 nt, Artificial Sequence
  Chemically synthesized
uauuguggucccgcagcau

SEQ ID NO: 84903 - RNA, 19 nt, Artificial Sequence
  Chemically synthesized
aaagucguacaugcggaac

SEQ ID NO: 84904 - RNA, 19 nt, Artificial Sequence
  Chemically synthesized
aaaaggucuccaggaggug

SEQ ID NO: 84905 - RNA, 19 nt, Artificial Sequence
  Chemically synthesized
uaugccagacaaagacauu

SEQ ID NO: 84906 - RNA, 19 nt, Artificial Sequence
  Chemically synthesized
acaucuucagcacuuugua

SEQ ID NO: 84907 - RNA, 19 nt, Artificial Sequence
  Chemically synthesized
acgcucaccaggucugaaa

SEQ ID NO: 84908 - RNA, 19 nt, Artificial Sequence
  Chemically synthesized
agaacgugcuuaaaaccuu

SEQ ID NO: 84909 - RNA, 19 nt, Artificial Sequence
  Chemically synthesized
uacagacaugcacacacau

SEQ ID NO: 84910 - RNA, 19 nt, Artificial Sequence
  Chemically synthesized
ucuccaggcugagacacau

SEQ ID NO: 84911 - RNA, 19 nt, Artificial Sequence
  Chemically synthesized
auguagaugugcacagaca

SEQ ID NO: 84912 - RNA, 19 nt, Artificial Sequence
  Chemically synthesized
accucucggaugaugucag

SEQ ID NO: 84913 - RNA, 19 nt, Artificial Sequence
  Chemically synthesized
ugaguagaucucccugagg

SEQ ID NO: 84914 - RNA, 19 nt, Artificial Sequence
  Chemically synthesized
accauggaugaugagcagg

SEQ ID NO: 84915 - RNA, 19 nt, Artificial Sequence
  Chemically synthesized
aaguggugggaggcaaaga

SEQ ID NO: 84916 - RNA, 19 nt, Artificial Sequence
  Chemically synthesized
caggaaagaggcaagagag

SEQ ID NO: 84917 - RNA, 19 nt, Artificial Sequence
  Chemically synthesized
aggaaagaggcaagagagg

SEQ ID NO: 84918 - RNA, 19 nt, Artificial Sequence
  Chemically synthesized
gucaacucagucucaaugu

SEQ ID NO: 84919 - RNA, 19 nt, Artificial Sequence
  Chemically synthesized
aacagcagcaccaggucau

SEQ ID NO: 84920 - RNA, 19 nt, Artificial Sequence
  Chemically synthesized
ugcuggacaggacgaaguu

SEQ ID NO: 84921 - RNA, 19 nt, Artificial Sequence
  Chemically synthesized
ccaucuaccacacggaucu

SEQ ID NO: 84922 - RNA, 19 nt, Artificial Sequence
  Chemically synthesized
gagagugcaggguugaugu

SEQ ID NO: 84923 - RNA, 19 nt, Artificial Sequence
  Chemically synthesized
agcgauguucugguaggug

SEQ ID NO: 84924 - RNA, 19 nt, Artificial Sequence
  Chemically synthesized
aagagggcugaggagcauu

SEQ ID NO: 84925 - RNA, 19 nt, Artificial Sequence
  Chemically synthesized
ucugagauuuguuucugaa

SEQ ID NO: 84926 - RNA, 19 nt, Artificial Sequence
  Chemically synthesized
auuucuccaggcugagaca

SEQ ID NO: 84927 - RNA, 19 nt, Artificial Sequence
  Chemically synthesized
gguuguuguaccacccauc

SEQ ID NO: 84928 - RNA, 19 nt, Artificial Sequence
  Chemically synthesized
guagaugugcacagacacc

SEQ ID NO: 84929 - RNA, 19 nt, Artificial Sequence
  Chemically synthesized
cugacggaugacuugaaga

SEQ ID NO: 84930 - RNA, 19 nt, Artificial Sequence
  Chemically synthesized
caccucaaacuuaugccac

SEQ ID NO: 84931 - RNA, 19 nt, Artificial Sequence
  Chemically synthesized
ccucuccaaaugguccauc

SEQ ID NO: 84932 - RNA, 19 nt, Artificial Sequence
  Chemically synthesized
ugaugacuucaggcaccuc

SEQ ID NO: 84933 - RNA, 19 nt, Artificial Sequence
  Chemically synthesized
gaaaaucuucccaugucag

SEQ ID NO: 84934 - RNA, 19 nt, Artificial Sequence
  Chemically synthesized
gccauugccauccuuguca

SEQ ID NO: 84935 - RNA, 19 nt, Artificial Sequence
  Chemically synthesized
ccugaaaaaggucuccagg

SEQ ID NO: 84936 - RNA, 19 nt, Artificial Sequence
  Chemically synthesized
aucuccuucuuggagaaca

SEQ ID NO: 84937 - RNA, 19 nt, Artificial Sequence
  Chemically synthesized
caaauuguucaaggacgau

SEQ ID NO: 84938 - RNA, 19 nt, Artificial Sequence
  Chemically synthesized
gugcgggaaaacuucagug

SEQ ID NO: 84939 - RNA, 19 nt, Artificial Sequence
  Chemically synthesized
gaaaucccgcacaucuuca

SEQ ID NO: 84940 - RNA, 19 nt, Artificial Sequence
  Chemically synthesized
uauacuccgggaguguuuu

SEQ ID NO: 84941 - RNA, 19 nt, Artificial Sequence
  Chemically synthesized
ucuguaaauggcuugccau

SEQ ID NO: 84942 - RNA, 19 nt, Artificial Sequence
  Chemically synthesized
acacacauacagacaugca

SEQ ID NO: 84943 - RNA, 19 nt, Artificial Sequence
  Chemically synthesized
gauuuguuucugaagucug

SEQ ID NO: 84944 - RNA, 19 nt, Artificial Sequence
  Chemically synthesized
gccuuuuccacauucuugg

SEQ ID NO: 84945 - RNA, 19 nt, Artificial Sequence
  Chemically synthesized
guucagaaccuucuggaag

SEQ ID NO: 84946 - RNA, 19 nt, Artificial Sequence
  Chemically synthesized
ccagaaguguccaugcuag

SEQ ID NO: 84947 - RNA, 19 nt, Artificial Sequence
  Chemically synthesized
ccucccacuaacacugaca

SEQ ID NO: 84948 - RNA, 19 nt, Artificial Sequence
  Chemically synthesized
ccacuaacacugacaccuc

SEQ ID NO: 84949 - RNA, 19 nt, Artificial Sequence
  Chemically synthesized
accucaaacuuaugccacu

SEQ ID NO: 84950 - RNA, 19 nt, Artificial Sequence
  Chemically synthesized
gcugaucuccaccuucuuc

SEQ ID NO: 84951 - RNA, 19 nt, Artificial Sequence
  Chemically synthesized
gggcucagggauuagaaug

SEQ ID NO: 84952 - RNA, 19 nt, Artificial Sequence
  Chemically synthesized
uuucucgcaggaaggugau

SEQ ID NO: 84953 - RNA, 19 nt, Artificial Sequence
  Chemically synthesized
cauggugagcaagauguag

SEQ ID NO: 84954 - RNA, 19 nt, Artificial Sequence
  Chemically synthesized
auccuggcugauguaggag

SEQ ID NO: 84955 - RNA, 19 nt, Artificial Sequence
  Chemically synthesized
guuguuggagaucucgaug

SEQ ID NO: 84956 - RNA, 19 nt, Artificial Sequence
  Chemically synthesized
agcauccugaugaacucau

SEQ ID NO: 84957 - RNA, 19 nt, Artificial Sequence
  Chemically synthesized
aggcgagacuuuuccucag

SEQ ID NO: 84958 - RNA, 19 nt, Artificial Sequence
  Chemically synthesized
agacuuuuccucaggagag

SEQ ID NO: 84959 - RNA, 21 nt, Artificial Sequence
  Chemically synthesized
gggugacagaugugccagaua

SEQ ID NO: 84960 - RNA, 21 nt, Artificial Sequence
  Chemically synthesized
caucguccuugaacaauuugu

SEQ ID NO: 84961 - RNA, 21 nt, Artificial Sequence
  Chemically synthesized
cauggaugcuggcaucuuaga

SEQ ID NO: 84962 - RNA, 21 nt, Artificial Sequence
  Chemically synthesized
caccacaacuaauuucaccca

SEQ ID NO: 84963 - RNA, 21 nt, Artificial Sequence
  Chemically synthesized
ggucaucaaucggaacucaag

SEQ ID NO: 84964 - RNA, 21 nt, Artificial Sequence
  Chemically synthesized
aagucauccgucagcugccaa

SEQ ID NO: 84965 - RNA, 21 nt, Artificial Sequence
  Chemically synthesized
caaggaggaacugacauggga

SEQ ID NO: 84966 - RNA, 21 nt, Artificial Sequence
  Chemically synthesized
cauggaagcuuuggaauggca

SEQ ID NO: 84967 - RNA, 21 nt, Artificial Sequence
  Chemically synthesized
ccuugauggaccauuuggaga

SEQ ID NO: 84968 - RNA, 21 nt, Artificial Sequence
  Chemically synthesized
auuugaugggugguacaacaa

SEQ ID NO: 84969 - RNA, 21 nt, Artificial Sequence
  Chemically synthesized
cucugauuucccaccucccaa

SEQ ID NO: 84970 - RNA, 21 nt, Artificial Sequence
  Chemically synthesized
gaaaggcucuccugaggaaaa

SEQ ID NO: 84971 - RNA, 21 nt, Artificial Sequence
  Chemically synthesized
cuaacaccacaacuaauuuca

SEQ ID NO: 84972 - RNA, 21 nt, Artificial Sequence
  Chemically synthesized
cguccuugaacaauuugugcg

SEQ ID NO: 84973 - RNA, 21 nt, Artificial Sequence
  Chemically synthesized
cagucuaacaccacaacuaau

SEQ ID NO: 84974 - RNA, 21 nt, Artificial Sequence
  Chemically synthesized
acaucacacgggcaucacaga

SEQ ID NO: 84975 - RNA, 21 nt, Artificial Sequence
  Chemically synthesized
acaaguacuaugugugugcau

SEQ ID NO: 84976 - RNA, 21 nt, Artificial Sequence
  Chemically synthesized
caugaaaggcucuccugagga

SEQ ID NO: 84977 - RNA, 21 nt, Artificial Sequence
  Chemically synthesized
gaaguuuucccgcacagacca

SEQ ID NO: 84978 - RNA, 21 nt, Artificial Sequence
  Chemically synthesized
guugguugaagaugugcggga

SEQ ID NO: 84979 - RNA, 21 nt, Artificial Sequence
  Chemically synthesized
cggugaguguaaggaugcagu

SEQ ID NO: 84980 - RNA, 21 nt, Artificial Sequence
  Chemically synthesized
aggacaaggaggaacugacau

SEQ ID NO: 84981 - RNA, 21 nt, Artificial Sequence
  Chemically synthesized
gaguguaaggaugcaguggga

SEQ ID NO: 84982 - RNA, 21 nt, Artificial Sequence
  Chemically synthesized
caucguccucacagucuuaca

SEQ ID NO: 84983 - RNA, 21 nt, Artificial Sequence
  Chemically synthesized
ugggaauggccucauuuccaa

SEQ ID NO: 84984 - RNA, 21 nt, Artificial Sequence
  Chemically synthesized
aguagucucccuuccaaauaa

SEQ ID NO: 84985 - RNA, 21 nt, Artificial Sequence
  Chemically synthesized
gcauggaugcuggcaucuuag

SEQ ID NO: 84986 - RNA, 21 nt, Artificial Sequence
  Chemically synthesized
gaagacaagcugaccugacaa

SEQ ID NO: 84987 - RNA, 21 nt, Artificial Sequence
  Chemically synthesized
aguucaagcgcuucauugaga

SEQ ID NO: 84988 - RNA, 21 nt, Artificial Sequence
  Chemically synthesized
uguuguucgugacuauuuuga

SEQ ID NO: 84989 - RNA, 21 nt, Artificial Sequence
  Chemically synthesized
gcugccaaguguucuguaaga

SEQ ID NO: 84990 - RNA, 21 nt, Artificial Sequence
  Chemically synthesized
ccuacaucagccaggauauga

SEQ ID NO: 84991 - RNA, 21 nt, Artificial Sequence
  Chemically synthesized
ggugccugaagucaucaagga

SEQ ID NO: 84992 - RNA, 21 nt, Artificial Sequence
  Chemically synthesized
ucaggaugcugagauccuuca

SEQ ID NO: 84993 - RNA, 21 nt, Artificial Sequence
  Chemically synthesized
ugacaaggauggcaauggcua

SEQ ID NO: 84994 - RNA, 21 nt, Artificial Sequence
  Chemically synthesized
ggcuguucuccaagaaggaga

SEQ ID NO: 84995 - RNA, 21 nt, Artificial Sequence
  Chemically synthesized
aggccugucagcucaucaaca

SEQ ID NO: 84996 - RNA, 21 nt, Artificial Sequence
  Chemically synthesized
gauuugaugggugguacaaca

SEQ ID NO: 84997 - RNA, 21 nt, Artificial Sequence
  Chemically synthesized
auaugaucugucccucuccca

SEQ ID NO: 84998 - RNA, 21 nt, Artificial Sequence
  Chemically synthesized
acaauuugugcggcuacggga

SEQ ID NO: 84999 - RNA, 21 nt, Artificial Sequence
  Chemically synthesized
ccuacaaagugcugaagaugu

SEQ ID NO: 85000 - RNA, 21 nt, Artificial Sequence
  Chemically synthesized
ccauggcaagccauuuacaga

SEQ ID NO: 85001 - RNA, 21 nt, Artificial Sequence
  Chemically synthesized
gcacuuccagaagguucugaa

SEQ ID NO: 85002 - RNA, 21 nt, Artificial Sequence
  Chemically synthesized
ccuuauguuccgcauguacga

SEQ ID NO: 85003 - RNA, 21 nt, Artificial Sequence
  Chemically synthesized
cauccugguggucuucaugaa

SEQ ID NO: 85004 - RNA, 21 nt, Artificial Sequence
  Chemically synthesized
acuaauuucacccaagguuuu

SEQ ID NO: 85005 - RNA, 21 nt, Artificial Sequence
  Chemically synthesized
cagcuaugcagauggcgugua

SEQ ID NO: 85006 - RNA, 21 nt, Artificial Sequence
  Chemically synthesized
guuugaggugucaguguuagu

SEQ ID NO: 85007 - RNA, 21 nt, Artificial Sequence
  Chemically synthesized
ccgaguuccucaacauucgca

SEQ ID NO: 85008 - RNA, 21 nt, Artificial Sequence
  Chemically synthesized
guuuuaagcacguucuuucau

SEQ ID NO: 85009 - RNA, 21 nt, Artificial Sequence
  Chemically synthesized
ccagucuaacaccacaacuaa

SEQ ID NO: 85010 - RNA, 21 nt, Artificial Sequence
  Chemically synthesized
ugugcaugucuguaugugugu

SEQ ID NO: 85011 - RNA, 21 nt, Artificial Sequence
  Chemically synthesized
ucuccauuuugggacauucua

SEQ ID NO: 85012 - RNA, 21 nt, Artificial Sequence
  Chemically synthesized
gagagaaguuccaacgcagcu

SEQ ID NO: 85013 - RNA, 21 nt, Artificial Sequence
  Chemically synthesized
gaugcugagauccuucaucga

SEQ ID NO: 85014 - RNA, 21 nt, Artificial Sequence
  Chemically synthesized
cuuugucuggcauaaaggaga

SEQ ID NO: 85015 - RNA, 21 nt, Artificial Sequence
  Chemically synthesized
agaggaccauguguugguuga

SEQ ID NO: 85016 - RNA, 21 nt, Artificial Sequence
  Chemically synthesized
uggcuaucacgugcuuucaga

SEQ ID NO: 85017 - RNA, 21 nt, Artificial Sequence
  Chemically synthesized
caggaaugggcuguucuccaa

SEQ ID NO: 85018 - RNA, 21 nt, Artificial Sequence
  Chemically synthesized
caagcugaccugacaaguacu

SEQ ID NO: 85019 - RNA, 21 nt, Artificial Sequence
  Chemically synthesized
agaugugccagauacccaaag

SEQ ID NO: 85020 - RNA, 21 nt, Artificial Sequence
  Chemically synthesized
gacagaugugccagauaccca

SEQ ID NO: 85021 - RNA, 21 nt, Artificial Sequence
  Chemically synthesized
ugucuagggacuagagugaga

SEQ ID NO: 85022 - RNA, 21 nt, Artificial Sequence
  Chemically synthesized
gaugugucucagccuggagaa

SEQ ID NO: 85023 - RNA, 21 nt, Artificial Sequence
  Chemically synthesized
uuggcaagaagguaacgucau

SEQ ID NO: 85024 - RNA, 21 nt, Artificial Sequence
  Chemically synthesized
cugaugagagcagcugugaca

SEQ ID NO: 85025 - RNA, 21 nt, Artificial Sequence
  Chemically synthesized
ucaacuucguccuguccagca

SEQ ID NO: 85026 - RNA, 21 nt, Artificial Sequence
  Chemically synthesized
ucuucuuccuggucccagcaa

SEQ ID NO: 85027 - RNA, 21 nt, Artificial Sequence
  Chemically synthesized
ucaugcugcgggaccacaaua

SEQ ID NO: 85028 - RNA, 21 nt, Artificial Sequence
  Chemically synthesized
ccuucaucgagaucuccaaca

SEQ ID NO: 85029 - RNA, 21 nt, Artificial Sequence
  Chemically synthesized
augaaaggcucuccugaggaa

SEQ ID NO: 85030 - RNA, 21 nt, Artificial Sequence
  Chemically synthesized
cauguucucucuggcugacaa

SEQ ID NO: 85031 - RNA, 21 nt, Artificial Sequence
  Chemically synthesized
ccuggagaccuuuuucaggca

SEQ ID NO: 85032 - RNA, 21 nt, Artificial Sequence
  Chemically synthesized
gucaucaaucggaacucaagu

SEQ ID NO: 85033 - RNA, 21 nt, Artificial Sequence
  Chemically synthesized
aaaggccugucagcucaucaa

SEQ ID NO: 85034 - RNA, 21 nt, Artificial Sequence
  Chemically synthesized
gguucugaaccggagucuauu

SEQ ID NO: 85035 - RNA, 21 nt, Artificial Sequence
  Chemically synthesized
uccagaagguucugaaccgga

SEQ ID NO: 85036 - RNA, 21 nt, Artificial Sequence
  Chemically synthesized
ugaauguguaccuguucucca

SEQ ID NO: 85037 - RNA, 21 nt, Artificial Sequence
  Chemically synthesized
cagcagccagcaucucuuuca

SEQ ID NO: 85038 - RNA, 21 nt, Artificial Sequence
  Chemically synthesized
ccaaggaugaguucaucagga

SEQ ID NO: 85039 - RNA, 21 nt, Artificial Sequence
  Chemically synthesized
guuccgcauguacgacuuuga

SEQ ID NO: 85040 - RNA, 21 nt, Artificial Sequence
  Chemically synthesized
acaaagugcugaagaugugga

SEQ ID NO: 85041 - RNA, 21 nt, Artificial Sequence
  Chemically synthesized
agucuaacaccacaacuaauu

SEQ ID NO: 85042 - RNA, 21 nt, Artificial Sequence
  Chemically synthesized
guacuaugugugugcaugucu

SEQ ID NO: 85043 - RNA, 21 nt, Artificial Sequence
  Chemically synthesized
uggugucugugcacaucuaca

SEQ ID NO: 85044 - RNA, 21 nt, Artificial Sequence
  Chemically synthesized
guaugucuuugccucccacca

SEQ ID NO: 85045 - RNA, 21 nt, Artificial Sequence
  Chemically synthesized
gucuuugucuggcauaaagga

SEQ ID NO: 85046 - RNA, 21 nt, Artificial Sequence
  Chemically synthesized
cccagucuaacaccacaacua

SEQ ID NO: 85047 - RNA, 21 nt, Artificial Sequence
  Chemically synthesized
aagcugaccugacaaguacua

SEQ ID NO: 85048 - RNA, 21 nt, Artificial Sequence
  Chemically synthesized
acuucagaaacaaaucucaga

SEQ ID NO: 85049 - RNA, 21 nt, Artificial Sequence
  Chemically synthesized
ucugcuuccagacuucagaaa

SEQ ID NO: 85050 - RNA, 21 nt, Artificial Sequence
  Chemically synthesized
ccucugcuuccagacuucaga

SEQ ID NO: 85051 - RNA, 21 nt, Artificial Sequence
  Chemically synthesized
cccaguugagcagagguuuga

SEQ ID NO: 85052 - RNA, 21 nt, Artificial Sequence
  Chemically synthesized
aaaaggccugucagcucauca

SEQ ID NO: 85053 - RNA, 21 nt, Artificial Sequence
  Chemically synthesized
cagccagcaucucuuucaugu

SEQ ID NO: 85054 - RNA, 21 nt, Artificial Sequence
  Chemically synthesized
acaauagcgagcuccgcuuca

SEQ ID NO: 85055 - RNA, 21 nt, Artificial Sequence
  Chemically synthesized
caugggaagauuuucacuuca

SEQ ID NO: 85056 - RNA, 21 nt, Artificial Sequence
  Chemically synthesized
ugcugagauccuucaucgaga

SEQ ID NO: 85057 - RNA, 21 nt, Artificial Sequence
  Chemically synthesized
cauggcaagccauuuacagaa

SEQ ID NO: 85058 - RNA, 21 nt, Artificial Sequence
  Chemically synthesized
cuauguccugcucaucaucca

SEQ ID NO: 85059 - RNA, 21 nt, Artificial Sequence
  Chemically synthesized
gauccuucaucgagaucucca

SEQ ID NO: 85060 - RNA, 21 nt, Artificial Sequence
  Chemically synthesized
aggucaacuucguccugucca

SEQ ID NO: 85061 - RNA, 21 nt, Artificial Sequence
  Chemically synthesized
acuauuuugagggcaguggau

SEQ ID NO: 85062 - RNA, 21 nt, Artificial Sequence
  Chemically synthesized
ccagaacaucgcuguguauga

SEQ ID NO: 85063 - RNA, 21 nt, Artificial Sequence
  Chemically synthesized
agacccuggcccaauaccuau

SEQ ID NO: 85064 - RNA, 21 nt, Artificial Sequence
  Chemically synthesized
augggugguacaacaaccuca

SEQ ID NO: 85065 - RNA, 21 nt, Artificial Sequence
  Chemically synthesized
aaguguucuguaagaagaucu

SEQ ID NO: 85066 - RNA, 21 nt, Artificial Sequence
  Chemically synthesized
uggucuucaagucauccguca

SEQ ID NO: 85067 - RNA, 21 nt, Artificial Sequence
  Chemically synthesized
gugccagauacccaaagcugu

SEQ ID NO: 85068 - RNA, 21 nt, Artificial Sequence
  Chemically synthesized
cuuccaugaugaugggucuga

SEQ ID NO: 85069 - RNA, 21 nt, Artificial Sequence
  Chemically synthesized
ucucuuucauguucuccuaca

SEQ ID NO: 85070 - RNA, 21 nt, Artificial Sequence
  Chemically synthesized
gagacugaguugacaccucag

SEQ ID NO: 85071 - RNA, 21 nt, Artificial Sequence
  Chemically synthesized
agcuuuggaauggcaaggcca

SEQ ID NO: 85072 - RNA, 21 nt, Artificial Sequence
  Chemically synthesized
ugaagaaauccgaaauaccac

SEQ ID NO: 85073 - RNA, 21 nt, Artificial Sequence
  Chemically synthesized
cuaugugugugcaugucugua

SEQ ID NO: 85074 - RNA, 21 nt, Artificial Sequence
  Chemically synthesized
cagcugccaaguguucuguaa

SEQ ID NO: 85075 - RNA, 21 nt, Artificial Sequence
  Chemically synthesized
auguguaccuguucuccauca

SEQ ID NO: 85076 - RNA, 21 nt, Artificial Sequence
  Chemically synthesized
agucuuacacagugugggcca

SEQ ID NO: 85077 - RNA, 21 nt, Artificial Sequence
  Chemically synthesized
uguucuccuacaucuugcuca

SEQ ID NO: 85078 - RNA, 21 nt, Artificial Sequence
  Chemically synthesized
ggucuucuuuggcuaucacgu

SEQ ID NO: 85079 - RNA, 21 nt, Artificial Sequence
  Chemically synthesized
aguucgaccucaggaccacua

SEQ ID NO: 85080 - RNA, 21 nt, Artificial Sequence
  Chemically synthesized
guuugaguggcuggcugacau

SEQ ID NO: 85081 - RNA, 21 nt, Artificial Sequence
  Chemically synthesized
cuuccuggucccagcaaucau

SEQ ID NO: 85082 - RNA, 21 nt, Artificial Sequence
  Chemically synthesized
ccugcucuauguccugcucau

SEQ ID NO: 85083 - RNA, 21 nt, Artificial Sequence
  Chemically synthesized
auguggugaauguguaccugu

SEQ ID NO: 85084 - RNA, 21 nt, Artificial Sequence
  Chemically synthesized
cguccucacagucuuacacag

SEQ ID NO: 85085 - RNA, 21 nt, Artificial Sequence
  Chemically synthesized
aggaggaacugacaugggaag

SEQ ID NO: 85086 - RNA, 21 nt, Artificial Sequence
  Chemically synthesized
cgacuuugaugggaauggccu

SEQ ID NO: 85087 - RNA, 21 nt, Artificial Sequence
  Chemically synthesized
gucuagggacuagagugagaa

SEQ ID NO: 85088 - RNA, 21 nt, Artificial Sequence
  Chemically synthesized
augugucucagccuggagaaa

SEQ ID NO: 85089 - RNA, 21 nt, Artificial Sequence
  Chemically synthesized
ggcacuuccagaagguucuga

SEQ ID NO: 85090 - RNA, 21 nt, Artificial Sequence
  Chemically synthesized
gacauugagacugaguugaca

SEQ ID NO: 85091 - RNA, 21 nt, Artificial Sequence
  Chemically synthesized
cauuuccaaggaugaguucau

SEQ ID NO: 85092 - RNA, 21 nt, Artificial Sequence
  Chemically synthesized
uaacuuggaggaagagcggca

SEQ ID NO: 85093 - RNA, 21 nt, Artificial Sequence
  Chemically synthesized
ugaagaugugcgggauuucug

SEQ ID NO: 85094 - RNA, 21 nt, Artificial Sequence
  Chemically synthesized
caucaaucggaacucaagugu

SEQ ID NO: 85095 - RNA, 21 nt, Artificial Sequence
  Chemically synthesized
cuccaguagucucccuuccaa

SEQ ID NO: 85096 - RNA, 21 nt, Artificial Sequence
  Chemically synthesized
aaaugccuugcaggagguaga

SEQ ID NO: 85097 - RNA, 21 nt, Artificial Sequence
  Chemically synthesized
acaacaaccucauggagcaca

SEQ ID NO: 85098 - RNA, 21 nt, Artificial Sequence
  Chemically synthesized
ggacuagagugagaaguaggg

SEQ ID NO: 85099 - RNA, 21 nt, Artificial Sequence
  Chemically synthesized
cugagaaguucgaccucagga

SEQ ID NO: 85100 - RNA, 21 nt, Artificial Sequence
  Chemically synthesized
ggugucugugcacaucuacau

SEQ ID NO: 85101 - RNA, 21 nt, Artificial Sequence
  Chemically synthesized
ugacaucauccgagaggugga

SEQ ID NO: 85102 - RNA, 21 nt, Artificial Sequence
  Chemically synthesized
ucagcugccaaguguucugua

SEQ ID NO: 85103 - RNA, 21 nt, Artificial Sequence
  Chemically synthesized
gaagaagguggagaucagcgu

SEQ ID NO: 85104 - RNA, 21 nt, Artificial Sequence
  Chemically synthesized
uccugauccuggccaucaugu

SEQ ID NO: 85105 - RNA, 21 nt, Artificial Sequence
  Chemically synthesized
uggaggugccugaagucauca

SEQ ID NO: 85106 - RNA, 21 nt, Artificial Sequence
  Chemically synthesized
caggacaaggaggaacugaca

SEQ ID NO: 85107 - RNA, 21 nt, Artificial Sequence
  Chemically synthesized
aguucaucaggaugcugagau

SEQ ID NO: 85108 - RNA, 21 nt, Artificial Sequence
  Chemically synthesized
acauccugguggucuucauga

SEQ ID NO: 85109 - RNA, 21 nt, Artificial Sequence
  Chemically synthesized
uuuggaauggcaaggccacaa

SEQ ID NO: 85110 - RNA, 21 nt, Artificial Sequence
  Chemically synthesized
ugaagauguggaugcacugcu

SEQ ID NO: 85111 - RNA, 21 nt, Artificial Sequence
  Chemically synthesized
uggaaaaggccugucagcuca

SEQ ID NO: 85112 - RNA, 21 nt, Artificial Sequence
  Chemically synthesized
cccagggcuuugaguacaagu

SEQ ID NO: 85113 - RNA, 21 nt, Artificial Sequence
  Chemically synthesized
uucacgcagcucugugucaaa

SEQ ID NO: 85114 - RNA, 21 nt, Artificial Sequence
  Chemically synthesized
cuucaugaaaggcucuccuga

SEQ ID NO: 85115 - RNA, 21 nt, Artificial Sequence
  Chemically synthesized
ucuggcugacaaggauggcaa

SEQ ID NO: 85116 - RNA, 21 nt, Artificial Sequence
  Chemically synthesized
ugcuggucgcuguuaucaaca

SEQ ID NO: 85117 - RNA, 21 nt, Artificial Sequence
  Chemically synthesized
gauggugaccgcuacugguuu

SEQ ID NO: 85118 - RNA, 21 nt, Artificial Sequence
  Chemically synthesized
aggaguggcauaaguuugagg

SEQ ID NO: 85119 - RNA, 21 nt, Artificial Sequence
  Chemically synthesized
ccuacaucuugcucaccaugu

SEQ ID NO: 85120 - RNA, 21 nt, Artificial Sequence
  Chemically synthesized
ucuccuacaucuugcucacca

SEQ ID NO: 85121 - RNA, 21 nt, Artificial Sequence
  Chemically synthesized
agacugaguugacaccucaga

SEQ ID NO: 85122 - RNA, 21 nt, Artificial Sequence
  Chemically synthesized
caucgugucugagaagcucgu

SEQ ID NO: 85123 - RNA, 21 nt, Artificial Sequence
  Chemically synthesized
gcuggucgcuguuaucaacau

SEQ ID NO: 85124 - RNA, 21 nt, Artificial Sequence
  Chemically synthesized
ugggcuguucuccaagaagga

SEQ ID NO: 85125 - RNA, 21 nt, Artificial Sequence
  Chemically synthesized
gaagaugugcgggauuucugg

SEQ ID NO: 85126 - RNA, 21 nt, Artificial Sequence
  Chemically synthesized
gagaggaccauguguugguug

SEQ ID NO: 85127 - RNA, 21 nt, Artificial Sequence
  Chemically synthesized
agauguggaugcacugcugcu

SEQ ID NO: 85128 - RNA, 21 nt, Artificial Sequence
  Chemically synthesized
agcauggaugcuggcaucuua

SEQ ID NO: 85129 - RNA, 21 nt, Artificial Sequence
  Chemically synthesized
ggugaguguaaggaugcagug

SEQ ID NO: 85130 - RNA, 21 nt, Artificial Sequence
  Chemically synthesized
acuucucccaccauuaugaga

SEQ ID NO: 85131 - RNA, 21 nt, Artificial Sequence
  Chemically synthesized
acucacuucucccaccauuau

SEQ ID NO: 85132 - RNA, 21 nt, Artificial Sequence
  Chemically synthesized
agguucugaaccggagucuau

SEQ ID NO: 85133 - RNA, 21 nt, Artificial Sequence
  Chemically synthesized
ugccagauacccaaagcugua

SEQ ID NO: 85134 - RNA, 21 nt, Artificial Sequence
  Chemically synthesized
cuuucauguucuccuacaucu

SEQ ID NO: 85135 - RNA, 21 nt, Artificial Sequence
  Chemically synthesized
accagacggugcaacaguuca

SEQ ID NO: 85136 - RNA, 21 nt, Artificial Sequence
  Chemically synthesized
agcugaugagagcagcuguga

SEQ ID NO: 85137 - RNA, 21 nt, Artificial Sequence
  Chemically synthesized
ugagggcaguggauuuggcuu

SEQ ID NO: 85138 - RNA, 21 nt, Artificial Sequence
  Chemically synthesized
guccuugaacaauuugugcgg

SEQ ID NO: 85139 - RNA, 21 nt, Artificial Sequence
  Chemically synthesized
caucuuagaacccucccuacu

SEQ ID NO: 85140 - RNA, 21 nt, Artificial Sequence
  Chemically synthesized
aaguacuaugugugugcaugu

SEQ ID NO: 85141 - RNA, 21 nt, Artificial Sequence
  Chemically synthesized
uuccagacuucagaaacaaau

SEQ ID NO: 85142 - RNA, 21 nt, Artificial Sequence
  Chemically synthesized
agugaaaccucugcuuccaga

SEQ ID NO: 85143 - RNA, 21 nt, Artificial Sequence
  Chemically synthesized
gcagugucuagggacuagagu

SEQ ID NO: 85144 - RNA, 21 nt, Artificial Sequence
  Chemically synthesized
gucucagccuggagaaauggu

SEQ ID NO: 85145 - RNA, 21 nt, Artificial Sequence
  Chemically synthesized
ggugguacaacaaccucaugg

SEQ ID NO: 85146 - RNA, 21 nt, Artificial Sequence
  Chemically synthesized
agaaguucgaccucaggacca

SEQ ID NO: 85147 - RNA, 21 nt, Artificial Sequence
  Chemically synthesized
ugugcacaucuacaucaccca

SEQ ID NO: 85148 - RNA, 21 nt, Artificial Sequence
  Chemically synthesized
agagguggaggagaaugacca

SEQ ID NO: 85149 - RNA, 21 nt, Artificial Sequence
  Chemically synthesized
uugggacauucuaaucccuga

SEQ ID NO: 85150 - RNA, 21 nt, Artificial Sequence
  Chemically synthesized
ccaucguccucacagucuuac

SEQ ID NO: 85151 - RNA, 21 nt, Artificial Sequence
  Chemically synthesized
acugacaugggaagauuuuca

SEQ ID NO: 85152 - RNA, 21 nt, Artificial Sequence
  Chemically synthesized
cuuccgagaguuccuggacau

SEQ ID NO: 85153 - RNA, 21 nt, Artificial Sequence
  Chemically synthesized
caaggaguaugaccuggugcu

SEQ ID NO: 85154 - RNA, 21 nt, Artificial Sequence
  Chemically synthesized
cuuuggaauggcaaggccaca

SEQ ID NO: 85155 - RNA, 21 nt, Artificial Sequence
  Chemically synthesized
uugaagaaauccgaaauacca

SEQ ID NO: 85156 - RNA, 21 nt, Artificial Sequence
  Chemically synthesized
aaaugccagcugccacuucca

SEQ ID NO: 85157 - RNA, 21 nt, Artificial Sequence
  Chemically synthesized
aggauaccggccauuucugga

SEQ ID NO: 85158 - RNA, 21 nt, Artificial Sequence
  Chemically synthesized
aucacacgggcaucacagaca

SEQ ID NO: 85159 - RNA, 21 nt, Artificial Sequence
  Chemically synthesized
gguuuggcaagaagguaacgu

SEQ ID NO: 85160 - RNA, 21 nt, Artificial Sequence
  Chemically synthesized
ugaggugguggaguccauguu

SEQ ID NO: 85161 - RNA, 21 nt, Artificial Sequence
  Chemically synthesized
uuuccaaggaugaguucauca

SEQ ID NO: 85162 - RNA, 21 nt, Artificial Sequence
  Chemically synthesized
agauccgugugguagauggca

SEQ ID NO: 85163 - RNA, 21 nt, Artificial Sequence
  Chemically synthesized
cacugaaguuuucccgcacag

SEQ ID NO: 85164 - RNA, 21 nt, Artificial Sequence
  Chemically synthesized
gcugaagauguggaugcacug

SEQ ID NO: 85165 - RNA, 21 nt, Artificial Sequence
  Chemically synthesized
aagccuacaaagugcugaaga

SEQ ID NO: 85166 - RNA, 21 nt, Artificial Sequence
  Chemically synthesized
acccauggcaagccauuuaca

SEQ ID NO: 85167 - RNA, 21 nt, Artificial Sequence
  Chemically synthesized
ccugacaaguacuaugugugu

SEQ ID NO: 85168 - RNA, 21 nt, Artificial Sequence
  Chemically synthesized
aaaucucagaagacaagcuga

SEQ ID NO: 85169 - RNA, 21 nt, Artificial Sequence
  Chemically synthesized
ucaguuugaguggcuggcuga

SEQ ID NO: 85170 - RNA, 21 nt, Artificial Sequence
  Chemically synthesized
gcucuagcauggacacuucug

SEQ ID NO: 85171 - RNA, 21 nt, Artificial Sequence
  Chemically synthesized
uggugguucuuccagaccgua

SEQ ID NO: 85172 - RNA, 21 nt, Artificial Sequence
  Chemically synthesized
cagcgacauugagacugaguu

SEQ ID NO: 85173 - RNA, 21 nt, Artificial Sequence
  Chemically synthesized
augggaauggccucauuucca

SEQ ID NO: 85174 - RNA, 21 nt, Artificial Sequence
  Chemically synthesized
gaagaaauccgaaauaccacc

SEQ ID NO: 85175 - RNA, 21 nt, Artificial Sequence
  Chemically synthesized
aaggagauugaagaaauccga

SEQ ID NO: 85176 - RNA, 21 nt, Artificial Sequence
  Chemically synthesized
cuccaagaaggagauugaaga

SEQ ID NO: 85177 - RNA, 21 nt, Artificial Sequence
  Chemically synthesized
ucguccuugaacaauuugugc

SEQ ID NO: 85178 - RNA, 21 nt, Artificial Sequence
  Chemically synthesized
cguucuuucaucagacccugg

SEQ ID NO: 85179 - RNA, 21 nt, Artificial Sequence
  Chemically synthesized
gucuaacaccacaacuaauuu

SEQ ID NO: 85180 - RNA, 21 nt, Artificial Sequence
  Chemically synthesized
cuaugcagauggcguguacca

SEQ ID NO: 85181 - RNA, 21 nt, Artificial Sequence
  Chemically synthesized
auggaugcuggcaucuuagaa

SEQ ID NO: 85182 - RNA, 21 nt, Artificial Sequence
  Chemically synthesized
gaccugacaaguacuaugugu

SEQ ID NO: 85183 - RNA, 21 nt, Artificial Sequence
  Chemically synthesized
guacaacaaccucauggagca

SEQ ID NO: 85184 - RNA, 21 nt, Artificial Sequence
  Chemically synthesized
uuccuauuucuggcugccuca

SEQ ID NO: 85185 - RNA, 21 nt, Artificial Sequence
  Chemically synthesized
ccaagaauguggaaaaggccu

SEQ ID NO: 85186 - RNA, 21 nt, Artificial Sequence
  Chemically synthesized
auaaguuugaggugucagugu

SEQ ID NO: 85187 - RNA, 21 nt, Artificial Sequence
  Chemically synthesized
uguggugaauguguaccuguu

SEQ ID NO: 85188 - RNA, 21 nt, Artificial Sequence
  Chemically synthesized
gacaugggaagauuuucacuu

SEQ ID NO: 85189 - RNA, 21 nt, Artificial Sequence
  Chemically synthesized
augaguucaucaggaugcuga

SEQ ID NO: 85190 - RNA, 21 nt, Artificial Sequence
  Chemically synthesized
cuuugaugggaauggccucau

SEQ ID NO: 85191 - RNA, 21 nt, Artificial Sequence
  Chemically synthesized
aggauggcaauggcuaccugu

SEQ ID NO: 85192 - RNA, 21 nt, Artificial Sequence
  Chemically synthesized
aggacauguuuguggagucca

SEQ ID NO: 85193 - RNA, 21 nt, Artificial Sequence
  Chemically synthesized
uggaagcuuuggaauggcaag

SEQ ID NO: 85194 - RNA, 21 nt, Artificial Sequence
  Chemically synthesized
ugcucccucuguuguucguga

SEQ ID NO: 85195 - RNA, 21 nt, Artificial Sequence
  Chemically synthesized
acugaaguuuucccgcacaga

SEQ ID NO: 85196 - RNA, 21 nt, Artificial Sequence
  Chemically synthesized
ucacgugcuuucagaccuggu

SEQ ID NO: 85197 - RNA, 21 nt, Artificial Sequence
  Chemically synthesized
accuauguaugcaaugcuccu

SEQ ID NO: 85198 - RNA, 21 nt, Artificial Sequence
  Chemically synthesized
caagccauuuacagaaaccca

SEQ ID NO: 85199 - RNA, 21 nt, Artificial Sequence
  Chemically synthesized
agugucuagggacuagaguga

SEQ ID NO: 85200 - RNA, 21 nt, Artificial Sequence
  Chemically synthesized
cagccuucucugauuucccac

SEQ ID NO: 85201 - RNA, 21 nt, Artificial Sequence
  Chemically synthesized
uggcaugaccaagaaugugga

SEQ ID NO: 85202 - RNA, 21 nt, Artificial Sequence
  Chemically synthesized
agaucuacuucaucuggguga

SEQ ID NO: 85203 - RNA, 21 nt, Artificial Sequence
  Chemically synthesized
cauccugcucuauguccugcu

SEQ ID NO: 85204 - RNA, 21 nt, Artificial Sequence
  Chemically synthesized
uuuccuggagagggccuacua

SEQ ID NO: 85205 - RNA, 21 nt, Artificial Sequence
  Chemically synthesized
cauuccagcccuugcuguuca

SEQ ID NO: 85206 - RNA, 21 nt, Artificial Sequence
  Chemically synthesized
gaagguaacgucauuccagcc

SEQ ID NO: 85207 - RNA, 21 nt, Artificial Sequence
  Chemically synthesized
acugaguugacaccucagaga

SEQ ID NO: 85208 - RNA, 21 nt, Artificial Sequence
  Chemically synthesized
ucauuuccaaggaugaguuca

SEQ ID NO: 85209 - RNA, 21 nt, Artificial Sequence
  Chemically synthesized
uuauguuccgcauguacgacu

SEQ ID NO: 85210 - RNA, 21 nt, Artificial Sequence
  Chemically synthesized
auccugguggucuucaugaaa

SEQ ID NO: 85211 - RNA, 21 nt, Artificial Sequence
  Chemically synthesized
gaaauuucaagaggcuccagg

SEQ ID NO: 85212 - RNA, 21 nt, Artificial Sequence
  Chemically synthesized
uauuuugagggcaguggauuu

SEQ ID NO: 85213 - RNA, 21 nt, Artificial Sequence
  Chemically synthesized
gugaccgcuacugguuugaga

SEQ ID NO: 85214 - RNA, 21 nt, Artificial Sequence
  Chemically synthesized
cuggcgucuacaugagaaaug

SEQ ID NO: 85215 - RNA, 21 nt, Artificial Sequence
  Chemically synthesized
gaguauacaggauaccggcca

SEQ ID NO: 85216 - RNA, 21 nt, Artificial Sequence
  Chemically synthesized
caucgcuguguaugaguggcu

SEQ ID NO: 85217 - RNA, 21 nt, Artificial Sequence
  Chemically synthesized
ggcuaucacgugcuuucagac

SEQ ID NO: 85218 - RNA, 21 nt, Artificial Sequence
  Chemically synthesized
aagccauuuacagaaacccac

SEQ ID NO: 85219 - RNA, 21 nt, Artificial Sequence
  Chemically synthesized
agaacccucccuacucccaua

SEQ ID NO: 85220 - RNA, 21 nt, Artificial Sequence
  Chemically synthesized
aguguaaggaugcagugggag

SEQ ID NO: 85221 - RNA, 21 nt, Artificial Sequence
  Chemically synthesized
ugugugugcaugucuguaugu

SEQ ID NO: 85222 - RNA, 21 nt, Artificial Sequence
  Chemically synthesized
agaagacaagcugaccugaca

SEQ ID NO: 85223 - RNA, 21 nt, Artificial Sequence
  Chemically synthesized
auccgagagguggaggagaau

SEQ ID NO: 85224 - RNA, 21 nt, Artificial Sequence
  Chemically synthesized
cuuugaguacaagucagggca

SEQ ID NO: 85225 - RNA, 21 nt, Artificial Sequence
  Chemically synthesized
caugguagcuuugcccugauc

SEQ ID NO: 85226 - RNA, 21 nt, Artificial Sequence
  Chemically synthesized
cuauuauuuucaucaugggcu

SEQ ID NO: 85227 - RNA, 21 nt, Artificial Sequence
  Chemically synthesized
ugugggccauguggugaaugu

SEQ ID NO: 85228 - RNA, 21 nt, Artificial Sequence
  Chemically synthesized
accgagagaaguuccaacgca

SEQ ID NO: 85229 - RNA, 21 nt, Artificial Sequence
  Chemically synthesized
cauugagacugaguugacacc

SEQ ID NO: 85230 - RNA, 21 nt, Artificial Sequence
  Chemically synthesized
auccuucaucgagaucuccaa

SEQ ID NO: 85231 - RNA, 21 nt, Artificial Sequence
  Chemically synthesized
ccuuuuucaggcaccuuuucu

SEQ ID NO: 85232 - RNA, 21 nt, Artificial Sequence
  Chemically synthesized
gauugaagaaauccgaaauac

SEQ ID NO: 85233 - RNA, 21 nt, Artificial Sequence
  Chemically synthesized
cagcuuccugcagaaaacacu

SEQ ID NO: 85234 - RNA, 21 nt, Artificial Sequence
  Chemically synthesized
ucaucgccaccuaccagaaca

SEQ ID NO: 85235 - RNA, 21 nt, Artificial Sequence
  Chemically synthesized
caucuaugguuccucgcauuc

SEQ ID NO: 85236 - RNA, 21 nt, Artificial Sequence
  Chemically synthesized
acaccacaacuaauuucaccc

SEQ ID NO: 85237 - RNA, 21 nt, Artificial Sequence
  Chemically synthesized
gggcaaagugaaaccucugcu

SEQ ID NO: 85238 - RNA, 21 nt, Artificial Sequence
  Chemically synthesized
cuagggacuagagugagaagu

SEQ ID NO: 85239 - RNA, 21 nt, Artificial Sequence
  Chemically synthesized
ucucugauuucccaccuccca

SEQ ID NO: 85240 - RNA, 21 nt, Artificial Sequence
  Chemically synthesized
cucacuucucccaccauuaug

SEQ ID NO: 85241 - RNA, 21 nt, Artificial Sequence
  Chemically synthesized
uguacaucugugagcggcacu

SEQ ID NO: 85242 - RNA, 21 nt, Artificial Sequence
  Chemically synthesized
ugucugugcacaucuacauca

SEQ ID NO: 85243 - RNA, 21 nt, Artificial Sequence
  Chemically synthesized
gauccuggccaucauguaugu

SEQ ID NO: 85244 - RNA, 21 nt, Artificial Sequence
  Chemically synthesized
ccaugaugaugggucugagcu

SEQ ID NO: 85245 - RNA, 21 nt, Artificial Sequence
  Chemically synthesized
ggugaauguguaccuguucuc

SEQ ID NO: 85246 - RNA, 21 nt, Artificial Sequence
  Chemically synthesized
ugggccauguggugaaugugu

SEQ ID NO: 85247 - RNA, 21 nt, Artificial Sequence
  Chemically synthesized
gagaaaccuuccucaaccgcu

SEQ ID NO: 85248 - RNA, 21 nt, Artificial Sequence
  Chemically synthesized
accuggugcugcuguuuaacu

SEQ ID NO: 85249 - RNA, 21 nt, Artificial Sequence
  Chemically synthesized
uugagggcaguggauuuggcu

SEQ ID NO: 85250 - RNA, 21 nt, Artificial Sequence
  Chemically synthesized
uugaacaauuugugcggcuac

SEQ ID NO: 85251 - RNA, 21 nt, Artificial Sequence
  Chemically synthesized
uaagcacguucuuucaucaga

SEQ ID NO: 85252 - RNA, 21 nt, Artificial Sequence
  Chemically synthesized
gcugaccugacaaguacuaug

SEQ ID NO: 85253 - RNA, 21 nt, Artificial Sequence
  Chemically synthesized
aacaaccucauggagcacaga

SEQ ID NO: 85254 - RNA, 21 nt, Artificial Sequence
  Chemically synthesized
aagugaaaccucugcuuccag

SEQ ID NO: 85255 - RNA, 21 nt, Artificial Sequence
  Chemically synthesized
ugugucucagccuggagaaau

SEQ ID NO: 85256 - RNA, 21 nt, Artificial Sequence
  Chemically synthesized
gauuucccaccucccaaccuu

SEQ ID NO: 85257 - RNA, 21 nt, Artificial Sequence
  Chemically synthesized
cuucuucaacucccugcagga

SEQ ID NO: 85258 - RNA, 21 nt, Artificial Sequence
  Chemically synthesized
guaagaagaucuacuucaucu

SEQ ID NO: 85259 - RNA, 21 nt, Artificial Sequence
  Chemically synthesized
cuucaagucauccgucagcug

SEQ ID NO: 85260 - RNA, 21 nt, Artificial Sequence
  Chemically synthesized
aagaagguaacgucauuccag

SEQ ID NO: 85261 - RNA, 21 nt, Artificial Sequence
  Chemically synthesized
ugguggucuucaugaaaggcu

SEQ ID NO: 85262 - RNA, 21 nt, Artificial Sequence
  Chemically synthesized
acugguuugagaacaccagga

SEQ ID NO: 85263 - RNA, 21 nt, Artificial Sequence
  Chemically synthesized
cagcaccaucguccuugaaca

SEQ ID NO: 85264 - RNA, 21 nt, Artificial Sequence
  Chemically synthesized
cuaucacgugcuuucagaccu

SEQ ID NO: 85265 - RNA, 21 nt, Artificial Sequence
  Chemically synthesized
gagaccuuagcaacaccaucu

SEQ ID NO: 85266 - RNA, 21 nt, Artificial Sequence
  Chemically synthesized
caugucuguauguguguuggg

SEQ ID NO: 85267 - RNA, 21 nt, Artificial Sequence
  Chemically synthesized
accucugcuuccagacuucag

SEQ ID NO: 85268 - RNA, 21 nt, Artificial Sequence
  Chemically synthesized
ugaccaagaauguggaaaagg

SEQ ID NO: 85269 - RNA, 21 nt, Artificial Sequence
  Chemically synthesized
agggcuuugaguacaagucag

SEQ ID NO: 85270 - RNA, 21 nt, Artificial Sequence
  Chemically synthesized
ugguagcuuugcccugaucca

SEQ ID NO: 85271 - RNA, 21 nt, Artificial Sequence
  Chemically synthesized
cuuuccuggccucuuccauga

SEQ ID NO: 85272 - RNA, 21 nt, Artificial Sequence
  Chemically synthesized
gcuucauugagaacuaccggc

SEQ ID NO: 85273 - RNA, 21 nt, Artificial Sequence
  Chemically synthesized
ucaucaggaugcugagauccu

SEQ ID NO: 85274 - RNA, 21 nt, Artificial Sequence
  Chemically synthesized
aauggccucauuuccaaggau

SEQ ID NO: 85275 - RNA, 21 nt, Artificial Sequence
  Chemically synthesized
ugcuguuuaacuuggaggaag

SEQ ID NO: 85276 - RNA, 21 nt, Artificial Sequence
  Chemically synthesized
augaccuggugcugcuguuua

SEQ ID NO: 85277 - RNA, 21 nt, Artificial Sequence
  Chemically synthesized
ugugcucccucuguuguucgu

SEQ ID NO: 85278 - RNA, 21 nt, Artificial Sequence
  Chemically synthesized
ucagcaccaucguccuugaac

SEQ ID NO: 85279 - RNA, 21 nt, Artificial Sequence
  Chemically synthesized
caaugacacuguacuggaggc

SEQ ID NO: 85280 - RNA, 21 nt, Artificial Sequence
  Chemically synthesized
caugagaaaugccagcugcca

SEQ ID NO: 85281 - RNA, 21 nt, Artificial Sequence
  Chemically synthesized
aaaacacucccggaguauaca

SEQ ID NO: 85282 - RNA, 21 nt, Artificial Sequence
  Chemically synthesized
uaugguuccucgcauuccugg

SEQ ID NO: 85283 - RNA, 21 nt, Artificial Sequence
  Chemically synthesized
agguuuuaagcacguucuuuc

SEQ ID NO: 85284 - RNA, 21 nt, Artificial Sequence
  Chemically synthesized
acuaugugugugcaugucugu

SEQ ID NO: 85285 - RNA, 21 nt, Artificial Sequence
  Chemically synthesized
caaccucauggagcacagaug

SEQ ID NO: 85286 - RNA, 21 nt, Artificial Sequence
  Chemically synthesized
ggcaaagugaaaccucugcuu

SEQ ID NO: 85287 - RNA, 21 nt, Artificial Sequence
  Chemically synthesized
cuucucccaccauuaugagaa

SEQ ID NO: 85288 - RNA, 21 nt, Artificial Sequence
  Chemically synthesized
uuugaugggugguacaacaac

SEQ ID NO: 85289 - RNA, 21 nt, Artificial Sequence
  Chemically synthesized
aguuugaguggcuggcugaca

SEQ ID NO: 85290 - RNA, 21 nt, Artificial Sequence
  Chemically synthesized
ggugacagaugugccagauac

SEQ ID NO: 85291 - RNA, 21 nt, Artificial Sequence
  Chemically synthesized
cuucuuccuggucccagcaau

SEQ ID NO: 85292 - RNA, 21 nt, Artificial Sequence
  Chemically synthesized
uccugcucuauguccugcuca

SEQ ID NO: 85293 - RNA, 21 nt, Artificial Sequence
  Chemically synthesized
augucuuugccucccaccacu

SEQ ID NO: 85294 - RNA, 21 nt, Artificial Sequence
  Chemically synthesized
cagacggugcaacaguucaag

SEQ ID NO: 85295 - RNA, 21 nt, Artificial Sequence
  Chemically synthesized
gaaguuccaacgcagcugucu

SEQ ID NO: 85296 - RNA, 21 nt, Artificial Sequence
  Chemically synthesized
agaagguaacgucauuccagc

SEQ ID NO: 85297 - RNA, 21 nt, Artificial Sequence
  Chemically synthesized
agucucgccuuauguuccgca

SEQ ID NO: 85298 - RNA, 21 nt, Artificial Sequence
  Chemically synthesized
uggacauccugguggucuuca

SEQ ID NO: 85299 - RNA, 21 nt, Artificial Sequence
  Chemically synthesized
guuguucgugacuauuuugag

SEQ ID NO: 85300 - RNA, 21 nt, Artificial Sequence
  Chemically synthesized
ugagcaguuccuguccaccau

SEQ ID NO: 85301 - RNA, 21 nt, Artificial Sequence
  Chemically synthesized
uaacaccacaacuaauuucac

SEQ ID NO: 85302 - RNA, 21 nt, Artificial Sequence
  Chemically synthesized
ugaugggugguacaacaaccu

SEQ ID NO: 85303 - RNA, 21 nt, Artificial Sequence
  Chemically synthesized
cccuggcaugaccaagaaugu

SEQ ID NO: 85304 - RNA, 21 nt, Artificial Sequence
  Chemically synthesized
ccuuugagcccuucuucaacu

SEQ ID NO: 85305 - RNA, 21 nt, Artificial Sequence
  Chemically synthesized
uacccaaagcuguaccuugau

SEQ ID NO: 85306 - RNA, 21 nt, Artificial Sequence
  Chemically synthesized
auuacuggugguucuuccaga

SEQ ID NO: 85307 - RNA, 21 nt, Artificial Sequence
  Chemically synthesized
cugcgagaaaccuuccucaac

SEQ ID NO: 85308 - RNA, 21 nt, Artificial Sequence
  Chemically synthesized
uuuggcaagaagguaacguca

SEQ ID NO: 85309 - RNA, 21 nt, Artificial Sequence
  Chemically synthesized
uccaggacaaggaggaacuga

SEQ ID NO: 85310 - RNA, 21 nt, Artificial Sequence
  Chemically synthesized
gaguucaucaggaugcugaga

SEQ ID NO: 85311 - RNA, 21 nt, Artificial Sequence
  Chemically synthesized
ggaugaguucaucaggaugcu

SEQ ID NO: 85312 - RNA, 21 nt, Artificial Sequence
  Chemically synthesized
aggcauggaagcuuuggaaug

SEQ ID NO: 85313 - RNA, 21 nt, Artificial Sequence
  Chemically synthesized
gacuuauccuggcuagagcug

SEQ ID NO: 85314 - RNA, 21 nt, Artificial Sequence
  Chemically synthesized
ggagcaaugacacuguacugg

SEQ ID NO: 85315 - RNA, 21 nt, Artificial Sequence
  Chemically synthesized
ucaucaaucggaacucaagug

SEQ ID NO: 85316 - RNA, 21 nt, Artificial Sequence
  Chemically synthesized
auggcaagccauuuacagaaa

SEQ ID NO: 85317 - RNA, 21 nt, Artificial Sequence
  Chemically synthesized
ucccauaccuccuccucuucu

SEQ ID NO: 85318 - RNA, 21 nt, Artificial Sequence
  Chemically synthesized
uggcaucuuagaacccucccu

SEQ ID NO: 85319 - RNA, 21 nt, Artificial Sequence
  Chemically synthesized
aaccucugcuuccagacuuca

SEQ ID NO: 85320 - RNA, 21 nt, Artificial Sequence
  Chemically synthesized
cagugucuagggacuagagug

SEQ ID NO: 85321 - RNA, 21 nt, Artificial Sequence
  Chemically synthesized
gugucucagccuggagaaaug

SEQ ID NO: 85322 - RNA, 21 nt, Artificial Sequence
  Chemically synthesized
uguucuguaagaagaucuacu

SEQ ID NO: 85323 - RNA, 21 nt, Artificial Sequence
  Chemically synthesized
cuugauggaccauuuggagag

SEQ ID NO: 85324 - RNA, 21 nt, Artificial Sequence
  Chemically synthesized
uccuggucccagcaaucaucu

SEQ ID NO: 85325 - RNA, 21 nt, Artificial Sequence
  Chemically synthesized
aacaguucaagcgcuucauug

SEQ ID NO: 85326 - RNA, 21 nt, Artificial Sequence
  Chemically synthesized
gaaaagucucgccuuauguuc

SEQ ID NO: 85327 - RNA, 21 nt, Artificial Sequence
  Chemically synthesized
aauggcuaccuguccuuccga

SEQ ID NO: 85328 - RNA, 21 nt, Artificial Sequence
  Chemically synthesized
acauguuuguggaguccaugu

SEQ ID NO: 85329 - RNA, 21 nt, Artificial Sequence
  Chemically synthesized
ccuccuggagaccuuuuucag

SEQ ID NO: 85330 - RNA, 21 nt, Artificial Sequence
  Chemically synthesized
accuccuggagaccuuuuuca

SEQ ID NO: 85331 - RNA, 21 nt, Artificial Sequence
  Chemically synthesized
uccacagaaggucaacuucgu

SEQ ID NO: 85332 - RNA, 21 nt, Artificial Sequence
  Chemically synthesized
gaaggagauugaagaaauccg

SEQ ID NO: 85333 - RNA, 21 nt, Artificial Sequence
  Chemically synthesized
aaccaggacuuauccuggcua

SEQ ID NO: 85334 - RNA, 21 nt, Artificial Sequence
  Chemically synthesized
uguacaaccaggacuuauccu

SEQ ID NO: 85335 - RNA, 21 nt, Artificial Sequence
  Chemically synthesized
ugaccugacaaguacuaugug

SEQ ID NO: 85336 - RNA, 21 nt, Artificial Sequence
  Chemically synthesized
gguacaacaaccucauggagc

SEQ ID NO: 85337 - RNA, 21 nt, Artificial Sequence
  Chemically synthesized
gugucuagggacuagagugag

SEQ ID NO: 85338 - RNA, 21 nt, Artificial Sequence
  Chemically synthesized
ucacuucucccaccauuauga

SEQ ID NO: 85339 - RNA, 21 nt, Artificial Sequence
  Chemically synthesized
caagaauguggaaaaggccug

SEQ ID NO: 85340 - RNA, 21 nt, Artificial Sequence
  Chemically synthesized
aagguucugaaccggagucua

SEQ ID NO: 85341 - RNA, 21 nt, Artificial Sequence
  Chemically synthesized
aggugucaguguuagugggag

SEQ ID NO: 85342 - RNA, 21 nt, Artificial Sequence
  Chemically synthesized
gaguggcauaaguuugaggug

SEQ ID NO: 85343 - RNA, 21 nt, Artificial Sequence
  Chemically synthesized
aagcuguaccuugauggacca

SEQ ID NO: 85344 - RNA, 21 nt, Artificial Sequence
  Chemically synthesized
ucuuccuggucccagcaauca

SEQ ID NO: 85345 - RNA, 21 nt, Artificial Sequence
  Chemically synthesized
gucuuacacagugugggccau

SEQ ID NO: 85346 - RNA, 21 nt, Artificial Sequence
  Chemically synthesized
guugacaccucagagacugca

SEQ ID NO: 85347 - RNA, 21 nt, Artificial Sequence
  Chemically synthesized
acaucagccaggauaugaucu

SEQ ID NO: 85348 - RNA, 21 nt, Artificial Sequence
  Chemically synthesized
gaggaaaagucucgccuuaug

SEQ ID NO: 85349 - RNA, 21 nt, Artificial Sequence
  Chemically synthesized
aauccgaaauaccacccugca

SEQ ID NO: 85350 - RNA, 21 nt, Artificial Sequence
  Chemically synthesized
acaggauaccggccauuucug

SEQ ID NO: 85351 - RNA, 21 nt, Artificial Sequence
  Chemically synthesized
aagguuuuaagcacguucuuu

SEQ ID NO: 85352 - RNA, 21 nt, Artificial Sequence
  Chemically synthesized
uaugugugugcaugucuguau

SEQ ID NO: 85353 - RNA, 21 nt, Artificial Sequence
  Chemically synthesized
ugacaaguacuaugugugugc

SEQ ID NO: 85354 - RNA, 21 nt, Artificial Sequence
  Chemically synthesized
aagacaagcugaccugacaag

SEQ ID NO: 85355 - RNA, 21 nt, Artificial Sequence
  Chemically synthesized
aaacaaaucucagaagacaag

SEQ ID NO: 85356 - RNA, 21 nt, Artificial Sequence
  Chemically synthesized
gaugggugguacaacaaccuc

SEQ ID NO: 85357 - RNA, 21 nt, Artificial Sequence
  Chemically synthesized
ucuguaagaagaucuacuuca

SEQ ID NO: 85358 - RNA, 21 nt, Artificial Sequence
  Chemically synthesized
aagaccuggucuucaagucau

SEQ ID NO: 85359 - RNA, 21 nt, Artificial Sequence
  Chemically synthesized
cauccaugguagcuuugcccu

SEQ ID NO: 85360 - RNA, 21 nt, Artificial Sequence
  Chemically synthesized
aguugacaccucagagacugc

SEQ ID NO: 85361 - RNA, 21 nt, Artificial Sequence
  Chemically synthesized
cuccggaugagaaauuucaag

SEQ ID NO: 85362 - RNA, 21 nt, Artificial Sequence
  Chemically synthesized
guucagcaccaucguccuuga

SEQ ID NO: 85363 - RNA, 21 nt, Artificial Sequence
  Chemically synthesized
cccaagccuacaaagugcuga

SEQ ID NO: 85364 - RNA, 21 nt, Artificial Sequence
  Chemically synthesized
cccauggcaagccauuuacag

SEQ ID NO: 85365 - RNA, 21 nt, Artificial Sequence
  Chemically synthesized
acucccauaccuccuccucuu

SEQ ID NO: 85366 - RNA, 21 nt, Artificial Sequence
  Chemically synthesized
accugacaaguacuaugugug

SEQ ID NO: 85367 - RNA, 21 nt, Artificial Sequence
  Chemically synthesized
ucagaagacaagcugaccuga

SEQ ID NO: 85368 - RNA, 21 nt, Artificial Sequence
  Chemically synthesized
ucugauuucccaccucccaac

SEQ ID NO: 85369 - RNA, 21 nt, Artificial Sequence
  Chemically synthesized
uugaguggcuggcugacauca

SEQ ID NO: 85370 - RNA, 21 nt, Artificial Sequence
  Chemically synthesized
ugcucuauguccugcucauca

SEQ ID NO: 85371 - RNA, 21 nt, Artificial Sequence
  Chemically synthesized
cauguucuccuacaucuugcu

SEQ ID NO: 85372 - RNA, 21 nt, Artificial Sequence
  Chemically synthesized
agcgcuucauugagaacuacc

SEQ ID NO: 85373 - RNA, 21 nt, Artificial Sequence
  Chemically synthesized
caucgagaucuccaacaacug

SEQ ID NO: 85374 - RNA, 21 nt, Artificial Sequence
  Chemically synthesized
gacaaggauggcaauggcuac

SEQ ID NO: 85375 - RNA, 21 nt, Artificial Sequence
  Chemically synthesized
ugaugagagcagcugugacac

SEQ ID NO: 85376 - RNA, 21 nt, Artificial Sequence
  Chemically synthesized
ucuguugcuucccuuugguga

SEQ ID NO: 85377 - RNA, 21 nt, Artificial Sequence
  Chemically synthesized
cucuguugcuucccuuuggug

SEQ ID NO: 85378 - RNA, 21 nt, Artificial Sequence
  Chemically synthesized
acgugcuggucgcuguuauca

SEQ ID NO: 85379 - RNA, 21 nt, Artificial Sequence
  Chemically synthesized
acaccaggaaugggcuguucu

SEQ ID NO: 85380 - RNA, 21 nt, Artificial Sequence
  Chemically synthesized
agcaaugacacuguacuggag

SEQ ID NO: 85381 - RNA, 21 nt, Artificial Sequence
  Chemically synthesized
ugaaguuuucccgcacagacc

SEQ ID NO: 85382 - RNA, 21 nt, Artificial Sequence
  Chemically synthesized
aguuccucaacauucgcaucc

SEQ ID NO: 85383 - RNA, 21 nt, Artificial Sequence
  Chemically synthesized
cugagaaaccgcacaguguug

SEQ ID NO: 85384 - RNA, 21 nt, Artificial Sequence
  Chemically synthesized
gaugcuggcaucuuagaaccc

SEQ ID NO: 85385 - RNA, 21 nt, Artificial Sequence
  Chemically synthesized
ugugugcaugucuguaugugu

SEQ ID NO: 85386 - RNA, 21 nt, Artificial Sequence
  Chemically synthesized
cugaccugacaaguacuaugu

SEQ ID NO: 85387 - RNA, 21 nt, Artificial Sequence
  Chemically synthesized
ugaaccggagucuauucacag

SEQ ID NO: 85388 - RNA, 21 nt, Artificial Sequence
  Chemically synthesized
uggugaauguguaccuguucu

SEQ ID NO: 85389 - RNA, 21 nt, Artificial Sequence
  Chemically synthesized
augaucugucccucucccaga

SEQ ID NO: 85390 - RNA, 21 nt, Artificial Sequence
  Chemically synthesized
aaggaugaguucaucaggaug

SEQ ID NO: 85391 - RNA, 21 nt, Artificial Sequence
  Chemically synthesized
uuuucucccaggugcuggaca

SEQ ID NO: 85392 - RNA, 21 nt, Artificial Sequence
  Chemically synthesized
ugcugcuguuuaacuuggagg

SEQ ID NO: 85393 - RNA, 21 nt, Artificial Sequence
  Chemically synthesized
uggugcugcuguuuaacuugg

SEQ ID NO: 85394 - RNA, 21 nt, Artificial Sequence
  Chemically synthesized
aguaugaccuggugcugcugu

SEQ ID NO: 85395 - RNA, 21 nt, Artificial Sequence
  Chemically synthesized
cacagaaggucaacuucgucc

SEQ ID NO: 85396 - RNA, 21 nt, Artificial Sequence
  Chemically synthesized
ggaagcuuuggaauggcaagg

SEQ ID NO: 85397 - RNA, 21 nt, Artificial Sequence
  Chemically synthesized
ugucuuugucuggcauaaagg

SEQ ID NO: 85398 - RNA, 21 nt, Artificial Sequence
  Chemically synthesized
acugggcuugucucccauuac

SEQ ID NO: 85399 - RNA, 21 nt, Artificial Sequence
  Chemically synthesized
gagcacccaagccuacaaagu

SEQ ID NO: 85400 - RNA, 21 nt, Artificial Sequence
  Chemically synthesized
ucaaucggaacucaagugucu

SEQ ID NO: 85401 - RNA, 21 nt, Artificial Sequence
  Chemically synthesized
cuucuuuggcuaucacgugcu

SEQ ID NO: 85402 - RNA, 21 nt, Artificial Sequence
  Chemically synthesized
uaugcaaugcuccucagcccu

SEQ ID NO: 85403 - RNA, 21 nt, Artificial Sequence
  Chemically synthesized
uuuaagcacguucuuucauca

SEQ ID NO: 85404 - RNA, 21 nt, Artificial Sequence
  Chemically synthesized
agaaacaaaucucagaagaca

SEQ ID NO: 85405 - RNA, 21 nt, Artificial Sequence
  Chemically synthesized
uucccaccucccaaccuuguu

SEQ ID NO: 85406 - RNA, 21 nt, Artificial Sequence
  Chemically synthesized
cugaaccggagucuauucaca

SEQ ID NO: 85407 - RNA, 21 nt, Artificial Sequence
  Chemically synthesized
uaccuugauggaccauuugga

SEQ ID NO: 85408 - RNA, 21 nt, Artificial Sequence
  Chemically synthesized
guaccuugauggaccauuugg

SEQ ID NO: 85409 - RNA, 21 nt, Artificial Sequence
  Chemically synthesized
uuuccuggccucuuccaugau

SEQ ID NO: 85410 - RNA, 21 nt, Artificial Sequence
  Chemically synthesized
cucuuuccuggccucuuccau

SEQ ID NO: 85411 - RNA, 21 nt, Artificial Sequence
  Chemically synthesized
aaaccuuccucaaccgcuacg

SEQ ID NO: 85412 - RNA, 21 nt, Artificial Sequence
  Chemically synthesized
gugccugaagucaucaaggac

SEQ ID NO: 85413 - RNA, 21 nt, Artificial Sequence
  Chemically synthesized
gccuuauguuccgcauguacg

SEQ ID NO: 85414 - RNA, 21 nt, Artificial Sequence
  Chemically synthesized
ucugcagcccaaugucuuugu

SEQ ID NO: 85415 - RNA, 21 nt, Artificial Sequence
  Chemically synthesized
gcucugcagcccaaugucuuu

SEQ ID NO: 85416 - RNA, 21 nt, Artificial Sequence
  Chemically synthesized
ugcucugcagcccaaugucuu

SEQ ID NO: 85417 - RNA, 21 nt, Artificial Sequence
  Chemically synthesized
auugaagaaauccgaaauacc

SEQ ID NO: 85418 - RNA, 21 nt, Artificial Sequence
  Chemically synthesized
uccaagaaggagauugaagaa

SEQ ID NO: 85419 - RNA, 21 nt, Artificial Sequence
  Chemically synthesized
uuuacagaaacccacucggca

SEQ ID NO: 85420 - RNA, 21 nt, Artificial Sequence
  Chemically synthesized
gugcaugucuguauguguguu

SEQ ID NO: 85421 - RNA, 21 nt, Artificial Sequence
  Chemically synthesized
caaagugaaaccucugcuucc

SEQ ID NO: 85422 - RNA, 21 nt, Artificial Sequence
  Chemically synthesized
cuggcaugaccaagaaugugg

SEQ ID NO: 85423 - RNA, 21 nt, Artificial Sequence
  Chemically synthesized
cauccucaaagaccuggucuu

SEQ ID NO: 85424 - RNA, 21 nt, Artificial Sequence
  Chemically synthesized
ugaggugucaguguuaguggg

SEQ ID NO: 85425 - RNA, 21 nt, Artificial Sequence
  Chemically synthesized
gugacagaugugccagauacc

SEQ ID NO: 85426 - RNA, 21 nt, Artificial Sequence
  Chemically synthesized
caugaugaugggucugagcuc

SEQ ID NO: 85427 - RNA, 21 nt, Artificial Sequence
  Chemically synthesized
aucucuuucauguucuccuac

SEQ ID NO: 85428 - RNA, 21 nt, Artificial Sequence
  Chemically synthesized
ugcaacaguucaagcgcuuca

SEQ ID NO: 85429 - RNA, 21 nt, Artificial Sequence
  Chemically synthesized
agaucuccaacaacugccugu

SEQ ID NO: 85430 - RNA, 21 nt, Artificial Sequence
  Chemically synthesized
aaggcucuccugaggaaaagu

SEQ ID NO: 85431 - RNA, 21 nt, Artificial Sequence
  Chemically synthesized
cuggagaccuuuuucaggcac

SEQ ID NO: 85432 - RNA, 21 nt, Artificial Sequence
  Chemically synthesized
augucuuugucuggcauaaag

SEQ ID NO: 85433 - RNA, 21 nt, Artificial Sequence
  Chemically synthesized
aaugggcuguucuccaagaag

SEQ ID NO: 85434 - RNA, 21 nt, Artificial Sequence
  Chemically synthesized
ucaagugucuccagagcucuc

SEQ ID NO: 85435 - RNA, 21 nt, Artificial Sequence
  Chemically synthesized
gaaaacacucccggaguauac

SEQ ID NO: 85436 - RNA, 21 nt, Artificial Sequence
  Chemically synthesized
uuggcuaucacgugcuuucag

SEQ ID NO: 85437 - RNA, 21 nt, Artificial Sequence
  Chemically synthesized
uauguaugcaaugcuccucag

SEQ ID NO: 85438 - RNA, 21 nt, Artificial Sequence
  Chemically synthesized
uuaagcacguucuuucaucag

SEQ ID NO: 85439 - RNA, 21 nt, Artificial Sequence
  Chemically synthesized
ggaugcuggcaucuuagaacc

SEQ ID NO: 85440 - RNA, 21 nt, Artificial Sequence
  Chemically synthesized
agggacuagagugagaaguag

SEQ ID NO: 85441 - RNA, 21 nt, Artificial Sequence
  Chemically synthesized
ucagccuucucugauuuccca

SEQ ID NO: 85442 - RNA, 21 nt, Artificial Sequence
  Chemically synthesized
acaccucaccucuguucuucc

SEQ ID NO: 85443 - RNA, 21 nt, Artificial Sequence
  Chemically synthesized
uucugaaccggagucuauuca

SEQ ID NO: 85444 - RNA, 21 nt, Artificial Sequence
  Chemically synthesized
gaagaucuacuucaucugggu

SEQ ID NO: 85445 - RNA, 21 nt, Artificial Sequence
  Chemically synthesized
accucuacauccugcucuaug

SEQ ID NO: 85446 - RNA, 21 nt, Artificial Sequence
  Chemically synthesized
cuuccugcgagaaaccuuccu

SEQ ID NO: 85447 - RNA, 21 nt, Artificial Sequence
  Chemically synthesized
acaaggaggaacugacauggg

SEQ ID NO: 85448 - RNA, 21 nt, Artificial Sequence
  Chemically synthesized
cucgccuuauguuccgcaugu

SEQ ID NO: 85449 - RNA, 21 nt, Artificial Sequence
  Chemically synthesized
auguucucucuggcugacaag

SEQ ID NO: 85450 - RNA, 21 nt, Artificial Sequence
  Chemically synthesized
uguucgugacuauuuugaggg

SEQ ID NO: 85451 - RNA, 21 nt, Artificial Sequence
  Chemically synthesized
ucuccaagaaggagauugaag

SEQ ID NO: 85452 - RNA, 21 nt, Artificial Sequence
  Chemically synthesized
guucuccaagaaggagauuga

SEQ ID NO: 85453 - RNA, 21 nt, Artificial Sequence
  Chemically synthesized
ugcugaagauguggaugcacu

SEQ ID NO: 85454 - RNA, 21 nt, Artificial Sequence
  Chemically synthesized
aacucaagugucuccagagcu

SEQ ID NO: 85455 - RNA, 21 nt, Artificial Sequence
  Chemically synthesized
ugagaaaugccagcugccacu

SEQ ID NO: 85456 - RNA, 21 nt, Artificial Sequence
  Chemically synthesized
caaaugccuugcaggagguag

SEQ ID NO: 85457 - RNA, 21 nt, Artificial Sequence
  Chemically synthesized
ugcuuccagacuucagaaaca

SEQ ID NO: 85458 - RNA, 21 nt, Artificial Sequence
  Chemically synthesized
aaccuuguuccagguggccau

SEQ ID NO: 85459 - RNA, 21 nt, Artificial Sequence
  Chemically synthesized
uaucuggcacaucugucaccc

SEQ ID NO: 85460 - RNA, 21 nt, Artificial Sequence
  Chemically synthesized
acaaauuguucaaggacgaug

SEQ ID NO: 85461 - RNA, 21 nt, Artificial Sequence
  Chemically synthesized
ucuaagaugccagcauccaug

SEQ ID NO: 85462 - RNA, 21 nt, Artificial Sequence
  Chemically synthesized
ugggugaaauuaguuguggug

SEQ ID NO: 85463 - RNA, 21 nt, Artificial Sequence
  Chemically synthesized
cuugaguuccgauugaugacc

SEQ ID NO: 85464 - RNA, 21 nt, Artificial Sequence
  Chemically synthesized
uuggcagcugacggaugacuu

SEQ ID NO: 85465 - RNA, 21 nt, Artificial Sequence
  Chemically synthesized
ucccaugucaguuccuccuug

SEQ ID NO: 85466 - RNA, 21 nt, Artificial Sequence
  Chemically synthesized
ugccauuccaaagcuuccaug

SEQ ID NO: 85467 - RNA, 21 nt, Artificial Sequence
  Chemically synthesized
ucuccaaaugguccaucaagg

SEQ ID NO: 85468 - RNA, 21 nt, Artificial Sequence
  Chemically synthesized
uuguuguaccacccaucaaau

SEQ ID NO: 85469 - RNA, 21 nt, Artificial Sequence
  Chemically synthesized
uugggaggugggaaaucagag

SEQ ID NO: 85470 - RNA, 21 nt, Artificial Sequence
  Chemically synthesized
uuuuccucaggagagccuuuc

SEQ ID NO: 85471 - RNA, 21 nt, Artificial Sequence
  Chemically synthesized
ugaaauuaguugugguguuag

SEQ ID NO: 85472 - RNA, 21 nt, Artificial Sequence
  Chemically synthesized
cgcacaaauuguucaaggacg

SEQ ID NO: 85473 - RNA, 21 nt, Artificial Sequence
  Chemically synthesized
auuaguugugguguuagacug

SEQ ID NO: 85474 - RNA, 21 nt, Artificial Sequence
  Chemically synthesized
ucugugaugcccgugugaugu

SEQ ID NO: 85475 - RNA, 21 nt, Artificial Sequence
  Chemically synthesized
augcacacacauaguacuugu

SEQ ID NO: 85476 - RNA, 21 nt, Artificial Sequence
  Chemically synthesized
uccucaggagagccuuucaug

SEQ ID NO: 85477 - RNA, 21 nt, Artificial Sequence
  Chemically synthesized
uggucugugcgggaaaacuuc

SEQ ID NO: 85478 - RNA, 21 nt, Artificial Sequence
  Chemically synthesized
ucccgcacaucuucaaccaac

SEQ ID NO: 85479 - RNA, 21 nt, Artificial Sequence
  Chemically synthesized
acugcauccuuacacucaccg

SEQ ID NO: 85480 - RNA, 21 nt, Artificial Sequence
  Chemically synthesized
augucaguuccuccuuguccu

SEQ ID NO: 85481 - RNA, 21 nt, Artificial Sequence
  Chemically synthesized
ucccacugcauccuuacacuc

SEQ ID NO: 85482 - RNA, 21 nt, Artificial Sequence
  Chemically synthesized
uguaagacugugaggacgaug

SEQ ID NO: 85483 - RNA, 21 nt, Artificial Sequence
  Chemically synthesized
uuggaaaugaggccauuccca

SEQ ID NO: 85484 - RNA, 21 nt, Artificial Sequence
  Chemically synthesized
uuauuuggaagggagacuacu

SEQ ID NO: 85485 - RNA, 21 nt, Artificial Sequence
  Chemically synthesized
cuaagaugccagcauccaugc

SEQ ID NO: 85486 - RNA, 21 nt, Artificial Sequence
  Chemically synthesized
uugucaggucagcuugucuuc

SEQ ID NO: 85487 - RNA, 21 nt, Artificial Sequence
  Chemically synthesized
ucucaaugaagcgcuugaacu

SEQ ID NO: 85488 - RNA, 21 nt, Artificial Sequence
  Chemically synthesized
ucaaaauagucacgaacaaca

SEQ ID NO: 85489 - RNA, 21 nt, Artificial Sequence
  Chemically synthesized
ucuuacagaacacuuggcagc

SEQ ID NO: 85490 - RNA, 21 nt, Artificial Sequence
  Chemically synthesized
ucauauccuggcugauguagg

SEQ ID NO: 85491 - RNA, 21 nt, Artificial Sequence
  Chemically synthesized
uccuugaugacuucaggcacc

SEQ ID NO: 85492 - RNA, 21 nt, Artificial Sequence
  Chemically synthesized
ugaaggaucucagcauccuga

SEQ ID NO: 85493 - RNA, 21 nt, Artificial Sequence
  Chemically synthesized
uagccauugccauccuuguca

SEQ ID NO: 85494 - RNA, 21 nt, Artificial Sequence
  Chemically synthesized
ucuccuucuuggagaacagcc

SEQ ID NO: 85495 - RNA, 21 nt, Artificial Sequence
  Chemically synthesized
uguugaugagcugacaggccu

SEQ ID NO: 85496 - RNA, 21 nt, Artificial Sequence
  Chemically synthesized
uguuguaccacccaucaaauc

SEQ ID NO: 85497 - RNA, 21 nt, Artificial Sequence
  Chemically synthesized
ugggagagggacagaucauau

SEQ ID NO: 85498 - RNA, 21 nt, Artificial Sequence
  Chemically synthesized
ucccguagccgcacaaauugu

SEQ ID NO: 85499 - RNA, 21 nt, Artificial Sequence
  Chemically synthesized
acaucuucagcacuuuguagg

SEQ ID NO: 85500 - RNA, 21 nt, Artificial Sequence
  Chemically synthesized
ucuguaaauggcuugccaugg

SEQ ID NO: 85501 - RNA, 21 nt, Artificial Sequence
  Chemically synthesized
uucagaaccuucuggaagugc

SEQ ID NO: 85502 - RNA, 21 nt, Artificial Sequence
  Chemically synthesized
ucguacaugcggaacauaagg

SEQ ID NO: 85503 - RNA, 21 nt, Artificial Sequence
  Chemically synthesized
uucaugaagaccaccaggaug

SEQ ID NO: 85504 - RNA, 21 nt, Artificial Sequence
  Chemically synthesized
aaaaccuugggugaaauuagu

SEQ ID NO: 85505 - RNA, 21 nt, Artificial Sequence
  Chemically synthesized
uacacgccaucugcauagcug

SEQ ID NO: 85506 - RNA, 21 nt, Artificial Sequence
  Chemically synthesized
acuaacacugacaccucaaac

SEQ ID NO: 85507 - RNA, 21 nt, Artificial Sequence
  Chemically synthesized
ugcgaauguugaggaacucgg

SEQ ID NO: 85508 - RNA, 21 nt, Artificial Sequence
  Chemically synthesized
augaaagaacgugcuuaaaac

SEQ ID NO: 85509 - RNA, 21 nt, Artificial Sequence
  Chemically synthesized
uuaguugugguguuagacugg

SEQ ID NO: 85510 - RNA, 21 nt, Artificial Sequence
  Chemically synthesized
acacacauacagacaugcaca

SEQ ID NO: 85511 - RNA, 21 nt, Artificial Sequence
  Chemically synthesized
uagaaugucccaaaauggaga

SEQ ID NO: 85512 - RNA, 21 nt, Artificial Sequence
  Chemically synthesized
agcugcguuggaacuucucuc

SEQ ID NO: 85513 - RNA, 21 nt, Artificial Sequence
  Chemically synthesized
ucgaugaaggaucucagcauc

SEQ ID NO: 85514 - RNA, 21 nt, Artificial Sequence
  Chemically synthesized
ucuccuuuaugccagacaaag

SEQ ID NO: 85515 - RNA, 21 nt, Artificial Sequence
  Chemically synthesized
ucaaccaacacaugguccucu

SEQ ID NO: 85516 - RNA, 21 nt, Artificial Sequence
  Chemically synthesized
ucugaaagcacgugauagcca

SEQ ID NO: 85517 - RNA, 21 nt, Artificial Sequence
  Chemically synthesized
uuggagaacagcccauuccug

SEQ ID NO: 85518 - RNA, 21 nt, Artificial Sequence
  Chemically synthesized
aguacuugucaggucagcuug

SEQ ID NO: 85519 - RNA, 21 nt, Artificial Sequence
  Chemically synthesized
cuuuggguaucuggcacaucu

SEQ ID NO: 85520 - RNA, 21 nt, Artificial Sequence
  Chemically synthesized
uggguaucuggcacaucuguc

SEQ ID NO: 85521 - RNA, 21 nt, Artificial Sequence
  Chemically synthesized
ucucacucuagucccuagaca

SEQ ID NO: 85522 - RNA, 21 nt, Artificial Sequence
  Chemically synthesized
uucuccaggcugagacacauc

SEQ ID NO: 85523 - RNA, 21 nt, Artificial Sequence
  Chemically synthesized
augacguuaccuucuugccaa

SEQ ID NO: 85524 - RNA, 21 nt, Artificial Sequence
  Chemically synthesized
ugucacagcugcucucaucag

SEQ ID NO: 85525 - RNA, 21 nt, Artificial Sequence
  Chemically synthesized
ugcuggacaggacgaaguuga

SEQ ID NO: 85526 - RNA, 21 nt, Artificial Sequence
  Chemically synthesized
uugcugggaccaggaagaaga

SEQ ID NO: 85527 - RNA, 21 nt, Artificial Sequence
  Chemically synthesized
uauuguggucccgcagcauga

SEQ ID NO: 85528 - RNA, 21 nt, Artificial Sequence
  Chemically synthesized
uguuggagaucucgaugaagg

SEQ ID NO: 85529 - RNA, 21 nt, Artificial Sequence
  Chemically synthesized
uuccucaggagagccuuucau

SEQ ID NO: 85530 - RNA, 21 nt, Artificial Sequence
  Chemically synthesized
uugucagccagagagaacaug

SEQ ID NO: 85531 - RNA, 21 nt, Artificial Sequence
  Chemically synthesized
ugccugaaaaaggucuccagg

SEQ ID NO: 85532 - RNA, 21 nt, Artificial Sequence
  Chemically synthesized
acuugaguuccgauugaugac

SEQ ID NO: 85533 - RNA, 21 nt, Artificial Sequence
  Chemically synthesized
uugaugagcugacaggccuuu

SEQ ID NO: 85534 - RNA, 21 nt, Artificial Sequence
  Chemically synthesized
aauagacuccgguucagaacc

SEQ ID NO: 85535 - RNA, 21 nt, Artificial Sequence
  Chemically synthesized
uccgguucagaaccuucugga

SEQ ID NO: 85536 - RNA, 21 nt, Artificial Sequence
  Chemically synthesized
uggagaacagguacacauuca

SEQ ID NO: 85537 - RNA, 21 nt, Artificial Sequence
  Chemically synthesized
ugaaagagaugcuggcugcug

SEQ ID NO: 85538 - RNA, 21 nt, Artificial Sequence
  Chemically synthesized
uccugaugaacucauccuugg

SEQ ID NO: 85539 - RNA, 21 nt, Artificial Sequence
  Chemically synthesized
ucaaagucguacaugcggaac

SEQ ID NO: 85540 - RNA, 21 nt, Artificial Sequence
  Chemically synthesized
uccacaucuucagcacuuugu

SEQ ID NO: 85541 - RNA, 21 nt, Artificial Sequence
  Chemically synthesized
aauuaguugugguguuagacu

SEQ ID NO: 85542 - RNA, 21 nt, Artificial Sequence
  Chemically synthesized
agacaugcacacacauaguac

SEQ ID NO: 85543 - RNA, 21 nt, Artificial Sequence
  Chemically synthesized
uguagaugugcacagacacca

SEQ ID NO: 85544 - RNA, 21 nt, Artificial Sequence
  Chemically synthesized
uggugggaggcaaagacauac

SEQ ID NO: 85545 - RNA, 21 nt, Artificial Sequence
  Chemically synthesized
uccuuuaugccagacaaagac

SEQ ID NO: 85546 - RNA, 21 nt, Artificial Sequence
  Chemically synthesized
uaguugugguguuagacuggg

SEQ ID NO: 85547 - RNA, 21 nt, Artificial Sequence
  Chemically synthesized
uaguacuugucaggucagcuu

SEQ ID NO: 85548 - RNA, 21 nt, Artificial Sequence
  Chemically synthesized
ucugagauuuguuucugaagu

SEQ ID NO: 85549 - RNA, 21 nt, Artificial Sequence
  Chemically synthesized
uuucugaagucuggaagcaga

SEQ ID NO: 85550 - RNA, 21 nt, Artificial Sequence
  Chemically synthesized
ucugaagucuggaagcagagg

SEQ ID NO: 85551 - RNA, 21 nt, Artificial Sequence
  Chemically synthesized
ucaaaccucugcucaacuggg

SEQ ID NO: 85552 - RNA, 21 nt, Artificial Sequence
  Chemically synthesized
ugaugagcugacaggccuuuu

SEQ ID NO: 85553 - RNA, 21 nt, Artificial Sequence
  Chemically synthesized
acaugaaagagaugcuggcug

SEQ ID NO: 85554 - RNA, 21 nt, Artificial Sequence
  Chemically synthesized
ugaagcggagcucgcuauugu

SEQ ID NO: 85555 - RNA, 21 nt, Artificial Sequence
  Chemically synthesized
ugaagugaaaaucuucccaug

SEQ ID NO: 85556 - RNA, 21 nt, Artificial Sequence
  Chemically synthesized
ucucgaugaaggaucucagca

SEQ ID NO: 85557 - RNA, 21 nt, Artificial Sequence
  Chemically synthesized
uucuguaaauggcuugccaug

SEQ ID NO: 85558 - RNA, 21 nt, Artificial Sequence
  Chemically synthesized
uggaugaugagcaggacauag

SEQ ID NO: 85559 - RNA, 21 nt, Artificial Sequence
  Chemically synthesized
uggagaucucgaugaaggauc

SEQ ID NO: 85560 - RNA, 21 nt, Artificial Sequence
  Chemically synthesized
uggacaggacgaaguugaccu

SEQ ID NO: 85561 - RNA, 21 nt, Artificial Sequence
  Chemically synthesized
auccacugcccucaaaauagu

SEQ ID NO: 85562 - RNA, 21 nt, Artificial Sequence
  Chemically synthesized
ucauacacagcgauguucugg

SEQ ID NO: 85563 - RNA, 21 nt, Artificial Sequence
  Chemically synthesized
auagguauugggccagggucu

SEQ ID NO: 85564 - RNA, 21 nt, Artificial Sequence
  Chemically synthesized
ugagguuguuguaccacccau

SEQ ID NO: 85565 - RNA, 21 nt, Artificial Sequence
  Chemically synthesized
agaucuucuuacagaacacuu

SEQ ID NO: 85566 - RNA, 21 nt, Artificial Sequence
  Chemically synthesized
ugacggaugacuugaagacca

SEQ ID NO: 85567 - RNA, 21 nt, Artificial Sequence
  Chemically synthesized
acagcuuuggguaucuggcac

SEQ ID NO: 85568 - RNA, 21 nt, Artificial Sequence
  Chemically synthesized
ucagacccaucaucauggaag

SEQ ID NO: 85569 - RNA, 21 nt, Artificial Sequence
  Chemically synthesized
uguaggagaacaugaaagaga

SEQ ID NO: 85570 - RNA, 21 nt, Artificial Sequence
  Chemically synthesized
cugaggugucaacucagucuc

SEQ ID NO: 85571 - RNA, 21 nt, Artificial Sequence
  Chemically synthesized
uggccuugccauuccaaagcu

SEQ ID NO: 85572 - RNA, 21 nt, Artificial Sequence
  Chemically synthesized
gugguauuucggauuucuuca

SEQ ID NO: 85573 - RNA, 21 nt, Artificial Sequence
  Chemically synthesized
uacagacaugcacacacauag

SEQ ID NO: 85574 - RNA, 21 nt, Artificial Sequence
  Chemically synthesized
uuacagaacacuuggcagcug

SEQ ID NO: 85575 - RNA, 21 nt, Artificial Sequence
  Chemically synthesized
ugauggagaacagguacacau

SEQ ID NO: 85576 - RNA, 21 nt, Artificial Sequence
  Chemically synthesized
uggcccacacuguguaagacu

SEQ ID NO: 85577 - RNA, 21 nt, Artificial Sequence
  Chemically synthesized
ugagcaagauguaggagaaca

SEQ ID NO: 85578 - RNA, 21 nt, Artificial Sequence
  Chemically synthesized
acgugauagccaaagaagacc

SEQ ID NO: 85579 - RNA, 21 nt, Artificial Sequence
  Chemically synthesized
uagugguccugaggucgaacu

SEQ ID NO: 85580 - RNA, 21 nt, Artificial Sequence
  Chemically synthesized
augucagccagccacucaaac

SEQ ID NO: 85581 - RNA, 21 nt, Artificial Sequence
  Chemically synthesized
augauugcugggaccaggaag

SEQ ID NO: 85582 - RNA, 21 nt, Artificial Sequence
  Chemically synthesized
augagcaggacauagagcagg

SEQ ID NO: 85583 - RNA, 21 nt, Artificial Sequence
  Chemically synthesized
acagguacacauucaccacau

SEQ ID NO: 85584 - RNA, 21 nt, Artificial Sequence
  Chemically synthesized
cuguguaagacugugaggacg

SEQ ID NO: 85585 - RNA, 21 nt, Artificial Sequence
  Chemically synthesized
cuucccaugucaguuccuccu

SEQ ID NO: 85586 - RNA, 21 nt, Artificial Sequence
  Chemically synthesized
aggccauucccaucaaagucg

SEQ ID NO: 85587 - RNA, 21 nt, Artificial Sequence
  Chemically synthesized
uucucacucuagucccuagac

SEQ ID NO: 85588 - RNA, 21 nt, Artificial Sequence
  Chemically synthesized
uuucuccaggcugagacacau

SEQ ID NO: 85589 - RNA, 21 nt, Artificial Sequence
  Chemically synthesized
ucagaaccuucuggaagugcc

SEQ ID NO: 85590 - RNA, 21 nt, Artificial Sequence
  Chemically synthesized
ugucaacucagucucaauguc

SEQ ID NO: 85591 - RNA, 21 nt, Artificial Sequence
  Chemically synthesized
augaacucauccuuggaaaug

SEQ ID NO: 85592 - RNA, 21 nt, Artificial Sequence
  Chemically synthesized
ugccgcucuuccuccaaguua

SEQ ID NO: 85593 - RNA, 21 nt, Artificial Sequence
  Chemically synthesized
cagaaaucccgcacaucuuca

SEQ ID NO: 85594 - RNA, 21 nt, Artificial Sequence
  Chemically synthesized
acacuugaguuccgauugaug

SEQ ID NO: 85595 - RNA, 21 nt, Artificial Sequence
  Chemically synthesized
uuggaagggagacuacuggag

SEQ ID NO: 85596 - RNA, 21 nt, Artificial Sequence
  Chemically synthesized
ucuaccuccugcaaggcauuu

SEQ ID NO: 85597 - RNA, 21 nt, Artificial Sequence
  Chemically synthesized
ugugcuccaugagguuguugu

SEQ ID NO: 85598 - RNA, 21 nt, Artificial Sequence
  Chemically synthesized
cccuacuucucacucuagucc

SEQ ID NO: 85599 - RNA, 21 nt, Artificial Sequence
  Chemically synthesized
uccugaggucgaacuucucag

SEQ ID NO: 85600 - RNA, 21 nt, Artificial Sequence
  Chemically synthesized
auguagaugugcacagacacc

SEQ ID NO: 85601 - RNA, 21 nt, Artificial Sequence
  Chemically synthesized
uccaccucucggaugauguca

SEQ ID NO: 85602 - RNA, 21 nt, Artificial Sequence
  Chemically synthesized
uacagaacacuuggcagcuga

SEQ ID NO: 85603 - RNA, 21 nt, Artificial Sequence
  Chemically synthesized
acgcugaucuccaccuucuuc

SEQ ID NO: 85604 - RNA, 21 nt, Artificial Sequence
  Chemically synthesized
acaugauggccaggaucagga

SEQ ID NO: 85605 - RNA, 21 nt, Artificial Sequence
  Chemically synthesized
ugaugacuucaggcaccucca

SEQ ID NO: 85606 - RNA, 21 nt, Artificial Sequence
  Chemically synthesized
ugucaguuccuccuuguccug

SEQ ID NO: 85607 - RNA, 21 nt, Artificial Sequence
  Chemically synthesized
aucucagcauccugaugaacu

SEQ ID NO: 85608 - RNA, 21 nt, Artificial Sequence
  Chemically synthesized
ucaugaagaccaccaggaugu

SEQ ID NO: 85609 - RNA, 21 nt, Artificial Sequence
  Chemically synthesized
uuguggccuugccauuccaaa

SEQ ID NO: 85610 - RNA, 21 nt, Artificial Sequence
  Chemically synthesized
agcagugcauccacaucuuca

SEQ ID NO: 85611 - RNA, 21 nt, Artificial Sequence
  Chemically synthesized
ugagcugacaggccuuuucca

SEQ ID NO: 85612 - RNA, 21 nt, Artificial Sequence
  Chemically synthesized
acuuguacucaaagcccuggg

SEQ ID NO: 85613 - RNA, 21 nt, Artificial Sequence
  Chemically synthesized
uuugacacagagcugcgugaa

SEQ ID NO: 85614 - RNA, 21 nt, Artificial Sequence
  Chemically synthesized
ucaggagagccuuucaugaag

SEQ ID NO: 85615 - RNA, 21 nt, Artificial Sequence
  Chemically synthesized
uugccauccuugucagccaga

SEQ ID NO: 85616 - RNA, 21 nt, Artificial Sequence
  Chemically synthesized
uguugauaacagcgaccagca

SEQ ID NO: 85617 - RNA, 21 nt, Artificial Sequence
  Chemically synthesized
aaaccaguagcggucaccauc

SEQ ID NO: 85618 - RNA, 21 nt, Artificial Sequence
  Chemically synthesized
ccucaaacuuaugccacuccu

SEQ ID NO: 85619 - RNA, 21 nt, Artificial Sequence
  Chemically synthesized
acauggugagcaagauguagg

SEQ ID NO: 85620 - RNA, 21 nt, Artificial Sequence
  Chemically synthesized
uggugagcaagauguaggaga

SEQ ID NO: 85621 - RNA, 21 nt, Artificial Sequence
  Chemically synthesized
ucugaggugucaacucagucu

SEQ ID NO: 85622 - RNA, 21 nt, Artificial Sequence
  Chemically synthesized
acgagcuucucagacacgaug

SEQ ID NO: 85623 - RNA, 21 nt, Artificial Sequence
  Chemically synthesized
auguugauaacagcgaccagc

SEQ ID NO: 85624 - RNA, 21 nt, Artificial Sequence
  Chemically synthesized
uccuucuuggagaacagccca

SEQ ID NO: 85625 - RNA, 21 nt, Artificial Sequence
  Chemically synthesized
ccagaaaucccgcacaucuuc

SEQ ID NO: 85626 - RNA, 21 nt, Artificial Sequence
  Chemically synthesized
caaccaacacaugguccucuc

SEQ ID NO: 85627 - RNA, 21 nt, Artificial Sequence
  Chemically synthesized
agcagcagugcauccacaucu

SEQ ID NO: 85628 - RNA, 21 nt, Artificial Sequence
  Chemically synthesized
uaagaugccagcauccaugcu

SEQ ID NO: 85629 - RNA, 21 nt, Artificial Sequence
  Chemically synthesized
cacugcauccuuacacucacc

SEQ ID NO: 85630 - RNA, 21 nt, Artificial Sequence
  Chemically synthesized
ucucauaauggugggagaagu

SEQ ID NO: 85631 - RNA, 21 nt, Artificial Sequence
  Chemically synthesized
auaauggugggagaagugagu

SEQ ID NO: 85632 - RNA, 21 nt, Artificial Sequence
  Chemically synthesized
auagacuccgguucagaaccu

SEQ ID NO: 85633 - RNA, 21 nt, Artificial Sequence
  Chemically synthesized
uacagcuuuggguaucuggca

SEQ ID NO: 85634 - RNA, 21 nt, Artificial Sequence
  Chemically synthesized
agauguaggagaacaugaaag

SEQ ID NO: 85635 - RNA, 21 nt, Artificial Sequence
  Chemically synthesized
ugaacuguugcaccgucuggu

SEQ ID NO: 85636 - RNA, 21 nt, Artificial Sequence
  Chemically synthesized
ucacagcugcucucaucagcu

SEQ ID NO: 85637 - RNA, 21 nt, Artificial Sequence
  Chemically synthesized
aagccaaauccacugcccuca

SEQ ID NO: 85638 - RNA, 21 nt, Artificial Sequence
  Chemically synthesized
ccgcacaaauuguucaaggac

SEQ ID NO: 85639 - RNA, 21 nt, Artificial Sequence
  Chemically synthesized
aguagggaggguucuaagaug

SEQ ID NO: 85640 - RNA, 21 nt, Artificial Sequence
  Chemically synthesized
acaugcacacacauaguacuu

SEQ ID NO: 85641 - RNA, 21 nt, Artificial Sequence
  Chemically synthesized
auuuguuucugaagucuggaa

SEQ ID NO: 85642 - RNA, 21 nt, Artificial Sequence
  Chemically synthesized
ucuggaagcagagguuucacu

SEQ ID NO: 85643 - RNA, 21 nt, Artificial Sequence
  Chemically synthesized
acucuagucccuagacacugc

SEQ ID NO: 85644 - RNA, 21 nt, Artificial Sequence
  Chemically synthesized
accauuucuccaggcugagac

SEQ ID NO: 85645 - RNA, 21 nt, Artificial Sequence
  Chemically synthesized
ccaugagguuguuguaccacc

SEQ ID NO: 85646 - RNA, 21 nt, Artificial Sequence
  Chemically synthesized
ugguccugaggucgaacuucu

SEQ ID NO: 85647 - RNA, 21 nt, Artificial Sequence
  Chemically synthesized
ugggugauguagaugugcaca

SEQ ID NO: 85648 - RNA, 21 nt, Artificial Sequence
  Chemically synthesized
uggucauucuccuccaccucu

SEQ ID NO: 85649 - RNA, 21 nt, Artificial Sequence
  Chemically synthesized
ucagggauuagaaugucccaa

SEQ ID NO: 85650 - RNA, 21 nt, Artificial Sequence
  Chemically synthesized
guaagacugugaggacgaugg

SEQ ID NO: 85651 - RNA, 21 nt, Artificial Sequence
  Chemically synthesized
ugaaaaucuucccaugucagu

SEQ ID NO: 85652 - RNA, 21 nt, Artificial Sequence
  Chemically synthesized
auguccaggaacucucggaag

SEQ ID NO: 85653 - RNA, 21 nt, Artificial Sequence
  Chemically synthesized
agcaccaggucauacuccuug

SEQ ID NO: 85654 - RNA, 21 nt, Artificial Sequence
  Chemically synthesized
uguggccuugccauuccaaag

SEQ ID NO: 85655 - RNA, 21 nt, Artificial Sequence
  Chemically synthesized
ugguauuucggauuucuucaa

SEQ ID NO: 85656 - RNA, 21 nt, Artificial Sequence
  Chemically synthesized
uggaaguggcagcuggcauuu

SEQ ID NO: 85657 - RNA, 21 nt, Artificial Sequence
  Chemically synthesized
uccagaaauggccgguauccu

SEQ ID NO: 85658 - RNA, 21 nt, Artificial Sequence
  Chemically synthesized
ugucugugaugcccgugugau

SEQ ID NO: 85659 - RNA, 21 nt, Artificial Sequence
  Chemically synthesized
acguuaccuucuugccaaacc

SEQ ID NO: 85660 - RNA, 21 nt, Artificial Sequence
  Chemically synthesized
aacauggacuccaccaccuca

SEQ ID NO: 85661 - RNA, 21 nt, Artificial Sequence
  Chemically synthesized
ugaugaacucauccuuggaaa

SEQ ID NO: 85662 - RNA, 21 nt, Artificial Sequence
  Chemically synthesized
ugccaucuaccacacggaucu

SEQ ID NO: 85663 - RNA, 21 nt, Artificial Sequence
  Chemically synthesized
cugugcgggaaaacuucagug

SEQ ID NO: 85664 - RNA, 21 nt, Artificial Sequence
  Chemically synthesized
cagugcauccacaucuucagc

SEQ ID NO: 85665 - RNA, 21 nt, Artificial Sequence
  Chemically synthesized
ucuucagcacuuuguaggcuu

SEQ ID NO: 85666 - RNA, 21 nt, Artificial Sequence
  Chemically synthesized
uguaaauggcuugccaugggu

SEQ ID NO: 85667 - RNA, 21 nt, Artificial Sequence
  Chemically synthesized
acacacauaguacuugucagg

SEQ ID NO: 85668 - RNA, 21 nt, Artificial Sequence
  Chemically synthesized
ucagcuugucuucugagauuu

SEQ ID NO: 85669 - RNA, 21 nt, Artificial Sequence
  Chemically synthesized
ucagccagccacucaaacuga

SEQ ID NO: 85670 - RNA, 21 nt, Artificial Sequence
  Chemically synthesized
cagaaguguccaugcuagagc

SEQ ID NO: 85671 - RNA, 21 nt, Artificial Sequence
  Chemically synthesized
uacggucuggaagaaccacca

SEQ ID NO: 85672 - RNA, 21 nt, Artificial Sequence
  Chemically synthesized
aacucagucucaaugucgcug

SEQ ID NO: 85673 - RNA, 21 nt, Artificial Sequence
  Chemically synthesized
uggaaaugaggccauucccau

SEQ ID NO: 85674 - RNA, 21 nt, Artificial Sequence
  Chemically synthesized
ggugguauuucggauuucuuc

SEQ ID NO: 85675 - RNA, 21 nt, Artificial Sequence
  Chemically synthesized
ucggauuucuucaaucuccuu

SEQ ID NO: 85676 - RNA, 21 nt, Artificial Sequence
  Chemically synthesized
ucuucaaucuccuucuuggag

SEQ ID NO: 85677 - RNA, 21 nt, Artificial Sequence
  Chemically synthesized
gcacaaauuguucaaggacga

SEQ ID NO: 85678 - RNA, 21 nt, Artificial Sequence
  Chemically synthesized
ccagggucugaugaaagaacg

SEQ ID NO: 85679 - RNA, 21 nt, Artificial Sequence
  Chemically synthesized
aaauuaguugugguguuagac

SEQ ID NO: 85680 - RNA, 21 nt, Artificial Sequence
  Chemically synthesized
ugguacacgccaucugcauag

SEQ ID NO: 85681 - RNA, 21 nt, Artificial Sequence
  Chemically synthesized
uucuaagaugccagcauccau

SEQ ID NO: 85682 - RNA, 21 nt, Artificial Sequence
  Chemically synthesized
acacauaguacuugucagguc

SEQ ID NO: 85683 - RNA, 21 nt, Artificial Sequence
  Chemically synthesized
ugcuccaugagguuguuguac

SEQ ID NO: 85684 - RNA, 21 nt, Artificial Sequence
  Chemically synthesized
ugaggcagccagaaauaggaa

SEQ ID NO: 85685 - RNA, 21 nt, Artificial Sequence
  Chemically synthesized
aggccuuuuccacauucuugg

SEQ ID NO: 85686 - RNA, 21 nt, Artificial Sequence
  Chemically synthesized
acacugacaccucaaacuuau

SEQ ID NO: 85687 - RNA, 21 nt, Artificial Sequence
  Chemically synthesized
aacagguacacauucaccaca

SEQ ID NO: 85688 - RNA, 21 nt, Artificial Sequence
  Chemically synthesized
aagugaaaaucuucccauguc

SEQ ID NO: 85689 - RNA, 21 nt, Artificial Sequence
  Chemically synthesized
ucagcauccugaugaacucau

SEQ ID NO: 85690 - RNA, 21 nt, Artificial Sequence
  Chemically synthesized
augaggccauucccaucaaag

SEQ ID NO: 85691 - RNA, 21 nt, Artificial Sequence
  Chemically synthesized
acagguagccauugccauccu

SEQ ID NO: 85692 - RNA, 21 nt, Artificial Sequence
  Chemically synthesized
uggacuccacaaacauguccu

SEQ ID NO: 85693 - RNA, 21 nt, Artificial Sequence
  Chemically synthesized
cuugccauuccaaagcuucca

SEQ ID NO: 85694 - RNA, 21 nt, Artificial Sequence
  Chemically synthesized
ucacgaacaacagagggagca

SEQ ID NO: 85695 - RNA, 21 nt, Artificial Sequence
  Chemically synthesized
ucugugcgggaaaacuucagu

SEQ ID NO: 85696 - RNA, 21 nt, Artificial Sequence
  Chemically synthesized
accaggucugaaagcacguga

SEQ ID NO: 85697 - RNA, 21 nt, Artificial Sequence
  Chemically synthesized
aggagcauugcauacauaggu

SEQ ID NO: 85698 - RNA, 21 nt, Artificial Sequence
  Chemically synthesized
uggguuucuguaaauggcuug

SEQ ID NO: 85699 - RNA, 21 nt, Artificial Sequence
  Chemically synthesized
ucacucuagucccuagacacu

SEQ ID NO: 85700 - RNA, 21 nt, Artificial Sequence
  Chemically synthesized
gugggaaaucagagaaggcug

SEQ ID NO: 85701 - RNA, 21 nt, Artificial Sequence
  Chemically synthesized
uccacauucuuggucaugcca

SEQ ID NO: 85702 - RNA, 21 nt, Artificial Sequence
  Chemically synthesized
ucacccagaugaaguagaucu

SEQ ID NO: 85703 - RNA, 21 nt, Artificial Sequence
  Chemically synthesized
agcaggacauagagcaggaug

SEQ ID NO: 85704 - RNA, 21 nt, Artificial Sequence
  Chemically synthesized
uaguaggcccucuccaggaaa

SEQ ID NO: 85705 - RNA, 21 nt, Artificial Sequence
  Chemically synthesized
ugaacagcaagggcuggaaug

SEQ ID NO: 85706 - RNA, 21 nt, Artificial Sequence
  Chemically synthesized
ggcuggaaugacguuaccuuc

SEQ ID NO: 85707 - RNA, 21 nt, Artificial Sequence
  Chemically synthesized
ucucugaggugucaacucagu

SEQ ID NO: 85708 - RNA, 21 nt, Artificial Sequence
  Chemically synthesized
ugaacucauccuuggaaauga

SEQ ID NO: 85709 - RNA, 21 nt, Artificial Sequence
  Chemically synthesized
agucguacaugcggaacauaa

SEQ ID NO: 85710 - RNA, 21 nt, Artificial Sequence
  Chemically synthesized
uuucaugaagaccaccaggau

SEQ ID NO: 85711 - RNA, 21 nt, Artificial Sequence
  Chemically synthesized
ccuggagccucuugaaauuuc

SEQ ID NO: 85712 - RNA, 21 nt, Artificial Sequence
  Chemically synthesized
aaauccacugcccucaaaaua

SEQ ID NO: 85713 - RNA, 21 nt, Artificial Sequence
  Chemically synthesized
ucucaaaccaguagcggucac

SEQ ID NO: 85714 - RNA, 21 nt, Artificial Sequence
  Chemically synthesized
cauuucucauguagacgccag

SEQ ID NO: 85715 - RNA, 21 nt, Artificial Sequence
  Chemically synthesized
uggccgguauccuguauacuc

SEQ ID NO: 85716 - RNA, 21 nt, Artificial Sequence
  Chemically synthesized
agccacucauacacagcgaug

SEQ ID NO: 85717 - RNA, 21 nt, Artificial Sequence
  Chemically synthesized
gucugaaagcacgugauagcc

SEQ ID NO: 85718 - RNA, 21 nt, Artificial Sequence
  Chemically synthesized
guggguuucuguaaauggcuu

SEQ ID NO: 85719 - RNA, 21 nt, Artificial Sequence
  Chemically synthesized
uaugggaguagggaggguucu

SEQ ID NO: 85720 - RNA, 21 nt, Artificial Sequence
  Chemically synthesized
cucccacugcauccuuacacu

SEQ ID NO: 85721 - RNA, 21 nt, Artificial Sequence
  Chemically synthesized
acauacagacaugcacacaca

SEQ ID NO: 85722 - RNA, 21 nt, Artificial Sequence
  Chemically synthesized
ugucaggucagcuugucuucu

SEQ ID NO: 85723 - RNA, 21 nt, Artificial Sequence
  Chemically synthesized
auucuccuccaccucucggau

SEQ ID NO: 85724 - RNA, 21 nt, Artificial Sequence
  Chemically synthesized
ugcccugacuuguacucaaag

SEQ ID NO: 85725 - RNA, 21 nt, Artificial Sequence
  Chemically synthesized
gaucagggcaaagcuaccaug

SEQ ID NO: 85726 - RNA, 21 nt, Artificial Sequence
  Chemically synthesized
agcccaugaugaaaauaauag

SEQ ID NO: 85727 - RNA, 21 nt, Artificial Sequence
  Chemically synthesized
acauucaccacauggcccaca

SEQ ID NO: 85728 - RNA, 21 nt, Artificial Sequence
  Chemically synthesized
ugcguuggaacuucucucggu

SEQ ID NO: 85729 - RNA, 21 nt, Artificial Sequence
  Chemically synthesized
ggugucaacucagucucaaug

SEQ ID NO: 85730 - RNA, 21 nt, Artificial Sequence
  Chemically synthesized
uuggagaucucgaugaaggau

SEQ ID NO: 85731 - RNA, 21 nt, Artificial Sequence
  Chemically synthesized
agaaaaggugccugaaaaagg

SEQ ID NO: 85732 - RNA, 21 nt, Artificial Sequence
  Chemically synthesized
guauuucggauuucuucaauc

SEQ ID NO: 85733 - RNA, 21 nt, Artificial Sequence
  Chemically synthesized
aguguuuucugcaggaagcug

SEQ ID NO: 85734 - RNA, 21 nt, Artificial Sequence
  Chemically synthesized
uguucugguagguggcgauga

SEQ ID NO: 85735 - RNA, 21 nt, Artificial Sequence
  Chemically synthesized
gaaugcgaggaaccauagaug

SEQ ID NO: 85736 - RNA, 21 nt, Artificial Sequence
  Chemically synthesized
gggugaaauuaguuguggugu

SEQ ID NO: 85737 - RNA, 21 nt, Artificial Sequence
  Chemically synthesized
agcagagguuucacuuugccc

SEQ ID NO: 85738 - RNA, 21 nt, Artificial Sequence
  Chemically synthesized
acuucucacucuagucccuag

SEQ ID NO: 85739 - RNA, 21 nt, Artificial Sequence
  Chemically synthesized
ugggaggugggaaaucagaga

SEQ ID NO: 85740 - RNA, 21 nt, Artificial Sequence
  Chemically synthesized
cauaauggugggagaagugag

SEQ ID NO: 85741 - RNA, 21 nt, Artificial Sequence
  Chemically synthesized
agugccgcucacagauguaca

SEQ ID NO: 85742 - RNA, 21 nt, Artificial Sequence
  Chemically synthesized
ugauguagaugugcacagaca

SEQ ID NO: 85743 - RNA, 21 nt, Artificial Sequence
  Chemically synthesized
acauacaugauggccaggauc

SEQ ID NO: 85744 - RNA, 21 nt, Artificial Sequence
  Chemically synthesized
agcucagacccaucaucaugg

SEQ ID NO: 85745 - RNA, 21 nt, Artificial Sequence
  Chemically synthesized
gagaacagguacacauucacc

SEQ ID NO: 85746 - RNA, 21 nt, Artificial Sequence
  Chemically synthesized
acacauucaccacauggccca

SEQ ID NO: 85747 - RNA, 21 nt, Artificial Sequence
  Chemically synthesized
agcgguugaggaagguuucuc

SEQ ID NO: 85748 - RNA, 21 nt, Artificial Sequence
  Chemically synthesized
aguuaaacagcagcaccaggu

SEQ ID NO: 85749 - RNA, 21 nt, Artificial Sequence
  Chemically synthesized
agccaaauccacugcccucaa

SEQ ID NO: 85750 - RNA, 21 nt, Artificial Sequence
  Chemically synthesized
guagccgcacaaauuguucaa

SEQ ID NO: 85751 - RNA, 21 nt, Artificial Sequence
  Chemically synthesized
ucugaugaaagaacgugcuua

SEQ ID NO: 85752 - RNA, 21 nt, Artificial Sequence
  Chemically synthesized
cauaguacuugucaggucagc

SEQ ID NO: 85753 - RNA, 21 nt, Artificial Sequence
  Chemically synthesized
ucugugcuccaugagguuguu

SEQ ID NO: 85754 - RNA, 21 nt, Artificial Sequence
  Chemically synthesized
cuggaagcagagguuucacuu

SEQ ID NO: 85755 - RNA, 21 nt, Artificial Sequence
  Chemically synthesized
auuucuccaggcugagacaca

SEQ ID NO: 85756 - RNA, 21 nt, Artificial Sequence
  Chemically synthesized
aagguugggaggugggaaauc

SEQ ID NO: 85757 - RNA, 21 nt, Artificial Sequence
  Chemically synthesized
uccugcagggaguugaagaag

SEQ ID NO: 85758 - RNA, 21 nt, Artificial Sequence
  Chemically synthesized
agaugaaguagaucuucuuac

SEQ ID NO: 85759 - RNA, 21 nt, Artificial Sequence
  Chemically synthesized
cagcugacggaugacuugaag

SEQ ID NO: 85760 - RNA, 21 nt, Artificial Sequence
  Chemically synthesized
cuggaaugacguuaccuucuu

SEQ ID NO: 85761 - RNA, 21 nt, Artificial Sequence
  Chemically synthesized
agccuuucaugaagaccacca

SEQ ID NO: 85762 - RNA, 21 nt, Artificial Sequence
  Chemically synthesized
uccugguguucucaaaccagu

SEQ ID NO: 85763 - RNA, 21 nt, Artificial Sequence
  Chemically synthesized
uguucaaggacgauggugcug

SEQ ID NO: 85764 - RNA, 21 nt, Artificial Sequence
  Chemically synthesized
aggucugaaagcacgugauag

SEQ ID NO: 85765 - RNA, 21 nt, Artificial Sequence
  Chemically synthesized
agaugguguugcuaaggucuc

SEQ ID NO: 85766 - RNA, 21 nt, Artificial Sequence
  Chemically synthesized
cccaacacacauacagacaug

SEQ ID NO: 85767 - RNA, 21 nt, Artificial Sequence
  Chemically synthesized
cugaagucuggaagcagaggu

SEQ ID NO: 85768 - RNA, 21 nt, Artificial Sequence
  Chemically synthesized
ccuuuuccacauucuugguca

SEQ ID NO: 85769 - RNA, 21 nt, Artificial Sequence
  Chemically synthesized
cugacuuguacucaaagcccu

SEQ ID NO: 85770 - RNA, 21 nt, Artificial Sequence
  Chemically synthesized
uggaucagggcaaagcuacca

SEQ ID NO: 85771 - RNA, 21 nt, Artificial Sequence
  Chemically synthesized
ucauggaagaggccaggaaag

SEQ ID NO: 85772 - RNA, 21 nt, Artificial Sequence
  Chemically synthesized
gccgguaguucucaaugaagc

SEQ ID NO: 85773 - RNA, 21 nt, Artificial Sequence
  Chemically synthesized
aggaucucagcauccugauga

SEQ ID NO: 85774 - RNA, 21 nt, Artificial Sequence
  Chemically synthesized
auccuuggaaaugaggccauu

SEQ ID NO: 85775 - RNA, 21 nt, Artificial Sequence
  Chemically synthesized
cuuccuccaaguuaaacagca

SEQ ID NO: 85776 - RNA, 21 nt, Artificial Sequence
  Chemically synthesized
uaaacagcagcaccaggucau

SEQ ID NO: 85777 - RNA, 21 nt, Artificial Sequence
  Chemically synthesized
acgaacaacagagggagcaca

SEQ ID NO: 85778 - RNA, 21 nt, Artificial Sequence
  Chemically synthesized
guucaaggacgauggugcuga

SEQ ID NO: 85779 - RNA, 21 nt, Artificial Sequence
  Chemically synthesized
gccuccaguacagugucauug

SEQ ID NO: 85780 - RNA, 21 nt, Artificial Sequence
  Chemically synthesized
uggcagcuggcauuucucaug

SEQ ID NO: 85781 - RNA, 21 nt, Artificial Sequence
  Chemically synthesized
uguauacuccgggaguguuuu

SEQ ID NO: 85782 - RNA, 21 nt, Artificial Sequence
  Chemically synthesized
ccaggaaugcgaggaaccaua

SEQ ID NO: 85783 - RNA, 21 nt, Artificial Sequence
  Chemically synthesized
gaaagaacgugcuuaaaaccu

SEQ ID NO: 85784 - RNA, 21 nt, Artificial Sequence
  Chemically synthesized
acagacaugcacacacauagu

SEQ ID NO: 85785 - RNA, 21 nt, Artificial Sequence
  Chemically synthesized
caucugugcuccaugagguug

SEQ ID NO: 85786 - RNA, 21 nt, Artificial Sequence
  Chemically synthesized
aagcagagguuucacuuugcc

SEQ ID NO: 85787 - RNA, 21 nt, Artificial Sequence
  Chemically synthesized
uucucauaauggugggagaag

SEQ ID NO: 85788 - RNA, 21 nt, Artificial Sequence
  Chemically synthesized
guuguuguaccacccaucaaa

SEQ ID NO: 85789 - RNA, 21 nt, Artificial Sequence
  Chemically synthesized
ugucagccagccacucaaacu

SEQ ID NO: 85790 - RNA, 21 nt, Artificial Sequence
  Chemically synthesized
guaucuggcacaucugucacc

SEQ ID NO: 85791 - RNA, 21 nt, Artificial Sequence
  Chemically synthesized
auugcugggaccaggaagaag

SEQ ID NO: 85792 - RNA, 21 nt, Artificial Sequence
  Chemically synthesized
ugagcaggacauagagcagga

SEQ ID NO: 85793 - RNA, 21 nt, Artificial Sequence
  Chemically synthesized
aguggugggaggcaaagacau

SEQ ID NO: 85794 - RNA, 21 nt, Artificial Sequence
  Chemically synthesized
cuugaacuguugcaccgucug

SEQ ID NO: 85795 - RNA, 21 nt, Artificial Sequence
  Chemically synthesized
agacagcugcguuggaacuuc

SEQ ID NO: 85796 - RNA, 21 nt, Artificial Sequence
  Chemically synthesized
gcuggaaugacguuaccuucu

SEQ ID NO: 85797 - RNA, 21 nt, Artificial Sequence
  Chemically synthesized
ugcggaacauaaggcgagacu

SEQ ID NO: 85798 - RNA, 21 nt, Artificial Sequence
  Chemically synthesized
ugaagaccaccaggaugucca

SEQ ID NO: 85799 - RNA, 21 nt, Artificial Sequence
  Chemically synthesized
cucaaaauagucacgaacaac

SEQ ID NO: 85800 - RNA, 21 nt, Artificial Sequence
  Chemically synthesized
augguggacaggaacugcuca

SEQ ID NO: 85801 - RNA, 21 nt, Artificial Sequence
  Chemically synthesized
gugaaauuaguugugguguua

SEQ ID NO: 85802 - RNA, 21 nt, Artificial Sequence
  Chemically synthesized
agguuguuguaccacccauca

SEQ ID NO: 85803 - RNA, 21 nt, Artificial Sequence
  Chemically synthesized
acauucuuggucaugccaggg

SEQ ID NO: 85804 - RNA, 21 nt, Artificial Sequence
  Chemically synthesized
aguugaagaagggcucaaagg

SEQ ID NO: 85805 - RNA, 21 nt, Artificial Sequence
  Chemically synthesized
aucaagguacagcuuugggua

SEQ ID NO: 85806 - RNA, 21 nt, Artificial Sequence
  Chemically synthesized
ucuggaagaaccaccaguaau

SEQ ID NO: 85807 - RNA, 21 nt, Artificial Sequence
  Chemically synthesized
guugaggaagguuucucgcag

SEQ ID NO: 85808 - RNA, 21 nt, Artificial Sequence
  Chemically synthesized
ugacguuaccuucuugccaaa

SEQ ID NO: 85809 - RNA, 21 nt, Artificial Sequence
  Chemically synthesized
ucaguuccuccuuguccugga

SEQ ID NO: 85810 - RNA, 21 nt, Artificial Sequence
  Chemically synthesized
ucucagcauccugaugaacuc

SEQ ID NO: 85811 - RNA, 21 nt, Artificial Sequence
  Chemically synthesized
agcauccugaugaacucaucc

SEQ ID NO: 85812 - RNA, 21 nt, Artificial Sequence
  Chemically synthesized
cauuccaaagcuuccaugccu

SEQ ID NO: 85813 - RNA, 21 nt, Artificial Sequence
  Chemically synthesized
cagcucuagccaggauaaguc

SEQ ID NO: 85814 - RNA, 21 nt, Artificial Sequence
  Chemically synthesized
ccaguacagugucauugcucc

SEQ ID NO: 85815 - RNA, 21 nt, Artificial Sequence
  Chemically synthesized
cacuugaguuccgauugauga

SEQ ID NO: 85816 - RNA, 21 nt, Artificial Sequence
  Chemically synthesized
uuucuguaaauggcuugccau

SEQ ID NO: 85817 - RNA, 21 nt, Artificial Sequence
  Chemically synthesized
agaagaggaggagguauggga

SEQ ID NO: 85818 - RNA, 21 nt, Artificial Sequence
  Chemically synthesized
agggaggguucuaagaugcca

SEQ ID NO: 85819 - RNA, 21 nt, Artificial Sequence
  Chemically synthesized
ugaagucuggaagcagagguu

SEQ ID NO: 85820 - RNA, 21 nt, Artificial Sequence
  Chemically synthesized
cacucuagucccuagacacug

SEQ ID NO: 85821 - RNA, 21 nt, Artificial Sequence
  Chemically synthesized
cauuucuccaggcugagacac

SEQ ID NO: 85822 - RNA, 21 nt, Artificial Sequence
  Chemically synthesized
aguagaucuucuuacagaaca

SEQ ID NO: 85823 - RNA, 21 nt, Artificial Sequence
  Chemically synthesized
cucuccaaaugguccaucaag

SEQ ID NO: 85824 - RNA, 21 nt, Artificial Sequence
  Chemically synthesized
agaugauugcugggaccagga

SEQ ID NO: 85825 - RNA, 21 nt, Artificial Sequence
  Chemically synthesized
caaugaagcgcuugaacuguu

SEQ ID NO: 85826 - RNA, 21 nt, Artificial Sequence
  Chemically synthesized
gaacauaaggcgagacuuuuc

SEQ ID NO: 85827 - RNA, 21 nt, Artificial Sequence
  Chemically synthesized
ucggaaggacagguagccauu

SEQ ID NO: 85828 - RNA, 21 nt, Artificial Sequence
  Chemically synthesized
acauggacuccacaaacaugu

SEQ ID NO: 85829 - RNA, 21 nt, Artificial Sequence
  Chemically synthesized
cugaaaaaggucuccaggagg

SEQ ID NO: 85830 - RNA, 21 nt, Artificial Sequence
  Chemically synthesized
ugaaaaaggucuccaggaggu

SEQ ID NO: 85831 - RNA, 21 nt, Artificial Sequence
  Chemically synthesized
acgaaguugaccuucugugga

SEQ ID NO: 85832 - RNA, 21 nt, Artificial Sequence
  Chemically synthesized
cggauuucuucaaucuccuuc

SEQ ID NO: 85833 - RNA, 21 nt, Artificial Sequence
  Chemically synthesized
uagccaggauaaguccugguu

SEQ ID NO: 85834 - RNA, 21 nt, Artificial Sequence
  Chemically synthesized
aggauaaguccugguuguaca

SEQ ID NO: 85835 - RNA, 21 nt, Artificial Sequence
  Chemically synthesized
cacauaguacuugucagguca

SEQ ID NO: 85836 - RNA, 21 nt, Artificial Sequence
  Chemically synthesized
gcuccaugagguuguuguacc

SEQ ID NO: 85837 - RNA, 21 nt, Artificial Sequence
  Chemically synthesized
cucacucuagucccuagacac

SEQ ID NO: 85838 - RNA, 21 nt, Artificial Sequence
  Chemically synthesized
ucauaauggugggagaaguga

SEQ ID NO: 85839 - RNA, 21 nt, Artificial Sequence
  Chemically synthesized
caggccuuuuccacauucuug

SEQ ID NO: 85840 - RNA, 21 nt, Artificial Sequence
  Chemically synthesized
uagacuccgguucagaaccuu

SEQ ID NO: 85841 - RNA, 21 nt, Artificial Sequence
  Chemically synthesized
cucccacuaacacugacaccu

SEQ ID NO: 85842 - RNA, 21 nt, Artificial Sequence
  Chemically synthesized
caccucaaacuuaugccacuc

SEQ ID NO: 85843 - RNA, 21 nt, Artificial Sequence
  Chemically synthesized
ugguccaucaagguacagcuu

SEQ ID NO: 85844 - RNA, 21 nt, Artificial Sequence
  Chemically synthesized
ugauugcugggaccaggaaga

SEQ ID NO: 85845 - RNA, 21 nt, Artificial Sequence
  Chemically synthesized
auggcccacacuguguaagac

SEQ ID NO: 85846 - RNA, 21 nt, Artificial Sequence
  Chemically synthesized
ugcagucucugaggugucaac

SEQ ID NO: 85847 - RNA, 21 nt, Artificial Sequence
  Chemically synthesized
agaucauauccuggcugaugu

SEQ ID NO: 85848 - RNA, 21 nt, Artificial Sequence
  Chemically synthesized
cauaaggcgagacuuuuccuc

SEQ ID NO: 85849 - RNA, 21 nt, Artificial Sequence
  Chemically synthesized
ugcagggugguauuucggauu

SEQ ID NO: 85850 - RNA, 21 nt, Artificial Sequence
  Chemically synthesized
cagaaauggccgguauccugu

SEQ ID NO: 85851 - RNA, 21 nt, Artificial Sequence
  Chemically synthesized
aaagaacgugcuuaaaaccuu

SEQ ID NO: 85852 - RNA, 21 nt, Artificial Sequence
  Chemically synthesized
auacagacaugcacacacaua

SEQ ID NO: 85853 - RNA, 21 nt, Artificial Sequence
  Chemically synthesized
gcacacacauaguacuuguca

SEQ ID NO: 85854 - RNA, 21 nt, Artificial Sequence
  Chemically synthesized
cuugucaggucagcuugucuu

SEQ ID NO: 85855 - RNA, 21 nt, Artificial Sequence
  Chemically synthesized
cuugucuucugagauuuguuu

SEQ ID NO: 85856 - RNA, 21 nt, Artificial Sequence
  Chemically synthesized
gagguuguuguaccacccauc

SEQ ID NO: 85857 - RNA, 21 nt, Artificial Sequence
  Chemically synthesized
ugaaguagaucuucuuacaga

SEQ ID NO: 85858 - RNA, 21 nt, Artificial Sequence
  Chemically synthesized
augacuugaagaccaggucuu

SEQ ID NO: 85859 - RNA, 21 nt, Artificial Sequence
  Chemically synthesized
agggcaaagcuaccauggaug

SEQ ID NO: 85860 - RNA, 21 nt, Artificial Sequence
  Chemically synthesized
gcagucucugaggugucaacu

SEQ ID NO: 85861 - RNA, 21 nt, Artificial Sequence
  Chemically synthesized
cuugaaauuucucauccggag

SEQ ID NO: 85862 - RNA, 21 nt, Artificial Sequence
  Chemically synthesized
ucaaggacgauggugcugaac

SEQ ID NO: 85863 - RNA, 21 nt, Artificial Sequence
  Chemically synthesized
ucagcacuuuguaggcuuggg

SEQ ID NO: 85864 - RNA, 21 nt, Artificial Sequence
  Chemically synthesized
cuguaaauggcuugccauggg

SEQ ID NO: 85865 - RNA, 21 nt, Artificial Sequence
  Chemically synthesized
aagaggaggagguaugggagu

SEQ ID NO: 85866 - RNA, 21 nt, Artificial Sequence
  Chemically synthesized
cacacauaguacuugucaggu

SEQ ID NO: 85867 - RNA, 21 nt, Artificial Sequence
  Chemically synthesized
ucaggucagcuugucuucuga

SEQ ID NO: 85868 - RNA, 21 nt, Artificial Sequence
  Chemically synthesized
guugggaggugggaaaucaga

SEQ ID NO: 85869 - RNA, 21 nt, Artificial Sequence
  Chemically synthesized
ugaugucagccagccacucaa

SEQ ID NO: 85870 - RNA, 21 nt, Artificial Sequence
  Chemically synthesized
ugaugagcaggacauagagca

SEQ ID NO: 85871 - RNA, 21 nt, Artificial Sequence
  Chemically synthesized
agcaagauguaggagaacaug

SEQ ID NO: 85872 - RNA, 21 nt, Artificial Sequence
  Chemically synthesized
gguaguucucaaugaagcgcu

SEQ ID NO: 85873 - RNA, 21 nt, Artificial Sequence
  Chemically synthesized
caguuguuggagaucucgaug

SEQ ID NO: 85874 - RNA, 21 nt, Artificial Sequence
  Chemically synthesized
guagccauugccauccuuguc

SEQ ID NO: 85875 - RNA, 21 nt, Artificial Sequence
  Chemically synthesized
gugucacagcugcucucauca

SEQ ID NO: 85876 - RNA, 21 nt, Artificial Sequence
  Chemically synthesized
ucaccaaagggaagcaacaga

SEQ ID NO: 85877 - RNA, 21 nt, Artificial Sequence
  Chemically synthesized
caccaaagggaagcaacagag

SEQ ID NO: 85878 - RNA, 21 nt, Artificial Sequence
  Chemically synthesized
ugauaacagcgaccagcacgu

SEQ ID NO: 85879 - RNA, 21 nt, Artificial Sequence
  Chemically synthesized
agaacagcccauuccuggugu

SEQ ID NO: 85880 - RNA, 21 nt, Artificial Sequence
  Chemically synthesized
cuccaguacagugucauugcu

SEQ ID NO: 85881 - RNA, 21 nt, Artificial Sequence
  Chemically synthesized
ggucugugcgggaaaacuuca

SEQ ID NO: 85882 - RNA, 21 nt, Artificial Sequence
  Chemically synthesized
ggaugcgaauguugaggaacu

SEQ ID NO: 85883 - RNA, 21 nt, Artificial Sequence
  Chemically synthesized
caacacugugcgguuucucag

SEQ ID NO: 85884 - RNA, 21 nt, Artificial Sequence
  Chemically synthesized
ggguucuaagaugccagcauc

SEQ ID NO: 85885 - RNA, 21 nt, Artificial Sequence
  Chemically synthesized
acacauacagacaugcacaca

SEQ ID NO: 85886 - RNA, 21 nt, Artificial Sequence
  Chemically synthesized
acauaguacuugucaggucag

SEQ ID NO: 85887 - RNA, 21 nt, Artificial Sequence
  Chemically synthesized
cugugaauagacuccgguuca

SEQ ID NO: 85888 - RNA, 21 nt, Artificial Sequence
  Chemically synthesized
agaacagguacacauucacca

SEQ ID NO: 85889 - RNA, 21 nt, Artificial Sequence
  Chemically synthesized
ucugggagagggacagaucau

SEQ ID NO: 85890 - RNA, 21 nt, Artificial Sequence
  Chemically synthesized
cauccugaugaacucauccuu

SEQ ID NO: 85891 - RNA, 21 nt, Artificial Sequence
  Chemically synthesized
uguccagcaccugggagaaaa

SEQ ID NO: 85892 - RNA, 21 nt, Artificial Sequence
  Chemically synthesized
ccuccaaguuaaacagcagca

SEQ ID NO: 85893 - RNA, 21 nt, Artificial Sequence
  Chemically synthesized
ccaaguuaaacagcagcacca

SEQ ID NO: 85894 - RNA, 21 nt, Artificial Sequence
  Chemically synthesized
acagcagcaccaggucauacu

SEQ ID NO: 85895 - RNA, 21 nt, Artificial Sequence
  Chemically synthesized
ggacgaaguugaccuucugug

SEQ ID NO: 85896 - RNA, 21 nt, Artificial Sequence
  Chemically synthesized
ccuugccauuccaaagcuucc

SEQ ID NO: 85897 - RNA, 21 nt, Artificial Sequence
  Chemically synthesized
ccuuuaugccagacaaagaca

SEQ ID NO: 85898 - RNA, 21 nt, Artificial Sequence
  Chemically synthesized
guaaugggagacaagcccagu

SEQ ID NO: 85899 - RNA, 21 nt, Artificial Sequence
  Chemically synthesized
acuuuguaggcuugggugcuc

SEQ ID NO: 85900 - RNA, 21 nt, Artificial Sequence
  Chemically synthesized
agacacuugaguuccgauuga

SEQ ID NO: 85901 - RNA, 21 nt, Artificial Sequence
  Chemically synthesized
agcacgugauagccaaagaag

SEQ ID NO: 85902 - RNA, 21 nt, Artificial Sequence
  Chemically synthesized
agggcugaggagcauugcaua

SEQ ID NO: 85903 - RNA, 21 nt, Artificial Sequence
  Chemically synthesized
ugaugaaagaacgugcuuaaa

SEQ ID NO: 85904 - RNA, 21 nt, Artificial Sequence
  Chemically synthesized
ugucuucugagauuuguuucu

SEQ ID NO: 85905 - RNA, 21 nt, Artificial Sequence
  Chemically synthesized
aacaagguugggaggugggaa

SEQ ID NO: 85906 - RNA, 21 nt, Artificial Sequence
  Chemically synthesized
ugugaauagacuccgguucag

SEQ ID NO: 85907 - RNA, 21 nt, Artificial Sequence
  Chemically synthesized
uccaaaugguccaucaaggua

SEQ ID NO: 85908 - RNA, 21 nt, Artificial Sequence
  Chemically synthesized
ccaaaugguccaucaagguac

SEQ ID NO: 85909 - RNA, 21 nt, Artificial Sequence
  Chemically synthesized
aucauggaagaggccaggaaa

SEQ ID NO: 85910 - RNA, 21 nt, Artificial Sequence
  Chemically synthesized
auggaagaggccaggaaagag

SEQ ID NO: 85911 - RNA, 21 nt, Artificial Sequence
  Chemically synthesized
cguagcgguugaggaagguuu

SEQ ID NO: 85912 - RNA, 21 nt, Artificial Sequence
  Chemically synthesized
guccuugaugacuucaggcac

SEQ ID NO: 85913 - RNA, 21 nt, Artificial Sequence
  Chemically synthesized
cguacaugcggaacauaaggc

SEQ ID NO: 85914 - RNA, 21 nt, Artificial Sequence
  Chemically synthesized
acaaagacauugggcugcaga

SEQ ID NO: 85915 - RNA, 21 nt, Artificial Sequence
  Chemically synthesized
aaagacauugggcugcagagc

SEQ ID NO: 85916 - RNA, 21 nt, Artificial Sequence
  Chemically synthesized
aagacauugggcugcagagca

SEQ ID NO: 85917 - RNA, 21 nt, Artificial Sequence
  Chemically synthesized
gguauuucggauuucuucaau

SEQ ID NO: 85918 - RNA, 21 nt, Artificial Sequence
  Chemically synthesized
uucuucaaucuccuucuugga

SEQ ID NO: 85919 - RNA, 21 nt, Artificial Sequence
  Chemically synthesized
ugccgaguggguuucuguaaa

SEQ ID NO: 85920 - RNA, 21 nt, Artificial Sequence
  Chemically synthesized
aacacacauacagacaugcac

SEQ ID NO: 85921 - RNA, 21 nt, Artificial Sequence
  Chemically synthesized
ggaagcagagguuucacuuug

SEQ ID NO: 85922 - RNA, 21 nt, Artificial Sequence
  Chemically synthesized
ccacauucuuggucaugccag

SEQ ID NO: 85923 - RNA, 21 nt, Artificial Sequence
  Chemically synthesized
aagaccaggucuuugaggaug

SEQ ID NO: 85924 - RNA, 21 nt, Artificial Sequence
  Chemically synthesized
cccacuaacacugacaccuca

SEQ ID NO: 85925 - RNA, 21 nt, Artificial Sequence
  Chemically synthesized
gguaucuggcacaucugucac

SEQ ID NO: 85926 - RNA, 21 nt, Artificial Sequence
  Chemically synthesized
gagcucagacccaucaucaug

SEQ ID NO: 85927 - RNA, 21 nt, Artificial Sequence
  Chemically synthesized
guaggagaacaugaaagagau

SEQ ID NO: 85928 - RNA, 21 nt, Artificial Sequence
  Chemically synthesized
ugaagcgcuugaacuguugca

SEQ ID NO: 85929 - RNA, 21 nt, Artificial Sequence
  Chemically synthesized
acaggcaguuguuggagaucu

SEQ ID NO: 85930 - RNA, 21 nt, Artificial Sequence
  Chemically synthesized
acuuuuccucaggagagccuu

SEQ ID NO: 85931 - RNA, 21 nt, Artificial Sequence
  Chemically synthesized
gugccugaaaaaggucuccag

SEQ ID NO: 85932 - RNA, 21 nt, Artificial Sequence
  Chemically synthesized
cuuuaugccagacaaagacau

SEQ ID NO: 85933 - RNA, 21 nt, Artificial Sequence
  Chemically synthesized
cuucuuggagaacagcccauu

SEQ ID NO: 85934 - RNA, 21 nt, Artificial Sequence
  Chemically synthesized
gagagcucuggagacacuuga

SEQ ID NO: 85935 - RNA, 21 nt, Artificial Sequence
  Chemically synthesized
guauacuccgggaguguuuuc

SEQ ID NO: 85936 - RNA, 21 nt, Artificial Sequence
  Chemically synthesized
cugaaagcacgugauagccaa

SEQ ID NO: 85937 - RNA, 21 nt, Artificial Sequence
  Chemically synthesized
cugaggagcauugcauacaua

SEQ ID NO: 85938 - RNA, 21 nt, Artificial Sequence
  Chemically synthesized
cugaugaaagaacgugcuuaa

SEQ ID NO: 85939 - RNA, 21 nt, Artificial Sequence
  Chemically synthesized
gguucuaagaugccagcaucc

SEQ ID NO: 85940 - RNA, 21 nt, Artificial Sequence
  Chemically synthesized
cuacuucucacucuagucccu

SEQ ID NO: 85941 - RNA, 21 nt, Artificial Sequence
  Chemically synthesized
ugggaaaucagagaaggcuga

SEQ ID NO: 85942 - RNA, 21 nt, Artificial Sequence
  Chemically synthesized
ggaagaacagaggugaggugu

SEQ ID NO: 85943 - RNA, 21 nt, Artificial Sequence
  Chemically synthesized
ugaauagacuccgguucagaa

SEQ ID NO: 85944 - RNA, 21 nt, Artificial Sequence
  Chemically synthesized
acccagaugaaguagaucuuc

SEQ ID NO: 85945 - RNA, 21 nt, Artificial Sequence
  Chemically synthesized
cauagagcaggauguagaggu

SEQ ID NO: 85946 - RNA, 21 nt, Artificial Sequence
  Chemically synthesized
aggaagguuucucgcaggaag

SEQ ID NO: 85947 - RNA, 21 nt, Artificial Sequence
  Chemically synthesized
cccaugucaguuccuccuugu

SEQ ID NO: 85948 - RNA, 21 nt, Artificial Sequence
  Chemically synthesized
acaugcggaacauaaggcgag

SEQ ID NO: 85949 - RNA, 21 nt, Artificial Sequence
  Chemically synthesized
cuugucagccagagagaacau

SEQ ID NO: 85950 - RNA, 21 nt, Artificial Sequence
  Chemically synthesized
cccucaaaauagucacgaaca

SEQ ID NO: 85951 - RNA, 21 nt, Artificial Sequence
  Chemically synthesized
cuucaaucuccuucuuggaga

SEQ ID NO: 85952 - RNA, 21 nt, Artificial Sequence
  Chemically synthesized
ucaaucuccuucuuggagaac

SEQ ID NO: 85953 - RNA, 21 nt, Artificial Sequence
  Chemically synthesized
agugcauccacaucuucagca

SEQ ID NO: 85954 - RNA, 21 nt, Artificial Sequence
  Chemically synthesized
agcucuggagacacuugaguu

SEQ ID NO: 85955 - RNA, 21 nt, Artificial Sequence
  Chemically synthesized
aguggcagcuggcauuucuca

SEQ ID NO: 85956 - RNA, 21 nt, Artificial Sequence
  Chemically synthesized
cuaccuccugcaaggcauuug

SEQ ID NO: 85957 - RNA, 21 nt, Artificial Sequence
  Chemically synthesized
uguuucugaagucuggaagca

SEQ ID NO: 85958 - RNA, 21 nt, Artificial Sequence
  Chemically synthesized
auggccaccuggaacaagguu

SEQ ID NO: 85959 - RNA, 23 nt, Artificial Sequence
  Chemically synthesized
ggaugaguucaucaggaugcuga

SEQ ID NO: 85960 - RNA, 23 nt, Artificial Sequence
  Chemically synthesized
cuacaaagugcugaagaugugga

SEQ ID NO: 85961 - RNA, 23 nt, Artificial Sequence
  Chemically synthesized
gaaguucgaccucaggaccacua

SEQ ID NO: 85962 - RNA, 23 nt, Artificial Sequence
  Chemically synthesized
uacuacgccuuugccgcacauca

SEQ ID NO: 85963 - RNA, 23 nt, Artificial Sequence
  Chemically synthesized
ucaagucauccgucagcugccaa

SEQ ID NO: 85964 - RNA, 23 nt, Artificial Sequence
  Chemically synthesized
uaaggaugcagugggagcaugga

SEQ ID NO: 85965 - RNA, 23 nt, Artificial Sequence
  Chemically synthesized
caucuucuuccuggucccagcaa

SEQ ID NO: 85966 - RNA, 23 nt, Artificial Sequence
  Chemically synthesized
cuucaugcugcgggaccacaaua

SEQ ID NO: 85967 - RNA, 23 nt, Artificial Sequence
  Chemically synthesized
gaaggucaacuucguccugucca

SEQ ID NO: 85968 - RNA, 23 nt, Artificial Sequence
  Chemically synthesized
gaguaugaccuggugcugcuguu

SEQ ID NO: 85969 - RNA, 23 nt, Artificial Sequence
  Chemically synthesized
gcucuagcauggacacuucuggu

SEQ ID NO: 85970 - RNA, 23 nt, Artificial Sequence
  Chemically synthesized
auaugaucugucccucucccaga

SEQ ID NO: 85971 - RNA, 23 nt, Artificial Sequence
  Chemically synthesized
cuuagaacccucccuacucccau

SEQ ID NO: 85972 - RNA, 23 nt, Artificial Sequence
  Chemically synthesized
aaggaugcagugggagcauggau

SEQ ID NO: 85973 - RNA, 23 nt, Artificial Sequence
  Chemically synthesized
guuugaguggcuggcugacauca

SEQ ID NO: 85974 - RNA, 23 nt, Artificial Sequence
  Chemically synthesized
uucagaccuggugagcguggaaa

SEQ ID NO: 85975 - RNA, 23 nt, Artificial Sequence
  Chemically synthesized
cuucucugauuucccaccuccca

SEQ ID NO: 85976 - RNA, 23 nt, Artificial Sequence
  Chemically synthesized
gacuuauccuggcuagagcugcu

SEQ ID NO: 85977 - RNA, 23 nt, Artificial Sequence
  Chemically synthesized
gauuucccaccucccaaccuugu

SEQ ID NO: 85978 - RNA, 23 nt, Artificial Sequence
  Chemically synthesized
acuacuacgccuuugccgcacau

SEQ ID NO: 85979 - RNA, 23 nt, Artificial Sequence
  Chemically synthesized
cuuucaucagacccuggcccaau

SEQ ID NO: 85980 - RNA, 23 nt, Artificial Sequence
  Chemically synthesized
ccucuguugcuucccuuugguga

SEQ ID NO: 85981 - RNA, 23 nt, Artificial Sequence
  Chemically synthesized
acaccucaccucuguucuuccua

SEQ ID NO: 85982 - RNA, 23 nt, Artificial Sequence
  Chemically synthesized
aucugugagcggcacuuccagaa

SEQ ID NO: 85983 - RNA, 23 nt, Artificial Sequence
  Chemically synthesized
acuucaugcugcgggaccacaau

SEQ ID NO: 85984 - RNA, 23 nt, Artificial Sequence
  Chemically synthesized
gauuuucacuucaugcugcggga

SEQ ID NO: 85985 - RNA, 23 nt, Artificial Sequence
  Chemically synthesized
acgucauuccagcccuugcuguu

SEQ ID NO: 85986 - RNA, 23 nt, Artificial Sequence
  Chemically synthesized
gaaauccgaaauaccacccugca

SEQ ID NO: 85987 - RNA, 23 nt, Artificial Sequence
  Chemically synthesized
gcugaagauguggaugcacugcu

SEQ ID NO: 85988 - RNA, 23 nt, Artificial Sequence
  Chemically synthesized
gccugaagucaucaaggaccucu

SEQ ID NO: 85989 - RNA, 23 nt, Artificial Sequence
  Chemically synthesized
agaaaugccagcugccacuucca

SEQ ID NO: 85990 - RNA, 23 nt, Artificial Sequence
  Chemically synthesized
agugcucugcagcccaaugucuu

SEQ ID NO: 85991 - RNA, 23 nt, Artificial Sequence
  Chemically synthesized
cuguucuccaagaaggagauuga

SEQ ID NO: 85992 - RNA, 23 nt, Artificial Sequence
  Chemically synthesized
gauggugaccgcuacugguuuga

SEQ ID NO: 85993 - RNA, 23 nt, Artificial Sequence
  Chemically synthesized
aguugagcagagguuugagccca

SEQ ID NO: 85994 - RNA, 23 nt, Artificial Sequence
  Chemically synthesized
cuuuuccuggagagggccuacua

SEQ ID NO: 85995 - RNA, 23 nt, Artificial Sequence
  Chemically synthesized
auucggcggagguuuggcaagaa

SEQ ID NO: 85996 - RNA, 23 nt, Artificial Sequence
  Chemically synthesized
gugcucugcagcccaaugucuuu

SEQ ID NO: 85997 - RNA, 23 nt, Artificial Sequence
  Chemically synthesized
gaaugggcuguucuccaagaagg

SEQ ID NO: 85998 - RNA, 23 nt, Artificial Sequence
  Chemically synthesized
auuucgugggaggugcagcgauu

SEQ ID NO: 85999 - RNA, 23 nt, Artificial Sequence
  Chemically synthesized
uuucagaccuggugagcguggaa

SEQ ID NO: 86000 - RNA, 23 nt, Artificial Sequence
  Chemically synthesized
cauuuacagaaacccacucggca

SEQ ID NO: 86001 - RNA, 23 nt, Artificial Sequence
  Chemically synthesized
cacaccucaccucuguucuuccu

SEQ ID NO: 86002 - RNA, 23 nt, Artificial Sequence
  Chemically synthesized
cuucuuccuggucccagcaauca

SEQ ID NO: 86003 - RNA, 23 nt, Artificial Sequence
  Chemically synthesized
gaguugacaccucagagacugca

SEQ ID NO: 86004 - RNA, 23 nt, Artificial Sequence
  Chemically synthesized
ccugaagucaucaaggaccucug

SEQ ID NO: 86005 - RNA, 23 nt, Artificial Sequence
  Chemically synthesized
aaagugaaaccucugcuuccaga

SEQ ID NO: 86006 - RNA, 23 nt, Artificial Sequence
  Chemically synthesized
acagucuuacacagugugggcca

SEQ ID NO: 86007 - RNA, 23 nt, Artificial Sequence
  Chemically synthesized
augcaaugcuccucagcccucuu

SEQ ID NO: 86008 - RNA, 23 nt, Artificial Sequence
  Chemically synthesized
caaagugaaaccucugcuuccag

SEQ ID NO: 86009 - RNA, 23 nt, Artificial Sequence
  Chemically synthesized
cuuuucucccaggugcuggacau

SEQ ID NO: 86010 - RNA, 23 nt, Artificial Sequence
  Chemically synthesized
uuuccuggagagggccuacuacu

SEQ ID NO: 86011 - RNA, 23 nt, Artificial Sequence
  Chemically synthesized
gacugaguugacaccucagagac

SEQ ID NO: 86012 - RNA, 23 nt, Artificial Sequence
  Chemically synthesized
agugaaaccucugcuuccagacu

SEQ ID NO: 86013 - RNA, 23 nt, Artificial Sequence
  Chemically synthesized
aagucauccgucagcugccaagu

SEQ ID NO: 86014 - RNA, 23 nt, Artificial Sequence
  Chemically synthesized
cauccugcucuauguccugcuca

SEQ ID NO: 86015 - RNA, 23 nt, Artificial Sequence
  Chemically synthesized
cucuuuccuggccucuuccauga

SEQ ID NO: 86016 - RNA, 23 nt, Artificial Sequence
  Chemically synthesized
gacuuugaugggaauggccucau

SEQ ID NO: 86017 - RNA, 23 nt, Artificial Sequence
  Chemically synthesized
auuacccgcuggcaggacaucaa

SEQ ID NO: 86018 - RNA, 23 nt, Artificial Sequence
  Chemically synthesized
ucagaagacaagcugaccugaca

SEQ ID NO: 86019 - RNA, 23 nt, Artificial Sequence
  Chemically synthesized
acuggugguucuuccagaccgua

SEQ ID NO: 86020 - RNA, 23 nt, Artificial Sequence
  Chemically synthesized
cauguucuccuacaucuugcuca

SEQ ID NO: 86021 - RNA, 23 nt, Artificial Sequence
  Chemically synthesized
gaauguggaaaaggccugucagc

SEQ ID NO: 86022 - RNA, 23 nt, Artificial Sequence
  Chemically synthesized
ucuuagaacccucccuacuccca

SEQ ID NO: 86023 - RNA, 23 nt, Artificial Sequence
  Chemically synthesized
acaucuucuuccuggucccagca

SEQ ID NO: 86024 - RNA, 23 nt, Artificial Sequence
  Chemically synthesized
cuuuccuggccucuuccaugaug

SEQ ID NO: 86025 - RNA, 23 nt, Artificial Sequence
  Chemically synthesized
gucauuccagcccuugcuguuca

SEQ ID NO: 86026 - RNA, 23 nt, Artificial Sequence
  Chemically synthesized
aauggcuaccuguccuuccgaga

SEQ ID NO: 86027 - RNA, 23 nt, Artificial Sequence
  Chemically synthesized
uucucccaggugcuggacaucaa

SEQ ID NO: 86028 - RNA, 23 nt, Artificial Sequence
  Chemically synthesized
uuuaacuuggaggaagagcggca

SEQ ID NO: 86029 - RNA, 23 nt, Artificial Sequence
  Chemically synthesized
uuuugagggcaguggauuuggcu

SEQ ID NO: 86030 - RNA, 23 nt, Artificial Sequence
  Chemically synthesized
cuauuucuggcugccucagccuu

SEQ ID NO: 86031 - RNA, 23 nt, Artificial Sequence
  Chemically synthesized
uacuacuacgccuuugccgcaca

SEQ ID NO: 86032 - RNA, 23 nt, Artificial Sequence
  Chemically synthesized
auugagaacuaccggcgccacau

SEQ ID NO: 86033 - RNA, 23 nt, Artificial Sequence
  Chemically synthesized
gagauccuucaucgagaucucca

SEQ ID NO: 86034 - RNA, 23 nt, Artificial Sequence
  Chemically synthesized
aaagucucgccuuauguuccgca

SEQ ID NO: 86035 - RNA, 23 nt, Artificial Sequence
  Chemically synthesized
caugagaaaugccagcugccacu

SEQ ID NO: 86036 - RNA, 23 nt, Artificial Sequence
  Chemically synthesized
uauuauuuucaucaugggcuucu

SEQ ID NO: 86037 - RNA, 23 nt, Artificial Sequence
  Chemically synthesized
augugccgcaaccucaucaccuu

SEQ ID NO: 86038 - RNA, 23 nt, Artificial Sequence
  Chemically synthesized
gcaaagugaaaccucugcuucca

SEQ ID NO: 86039 - RNA, 23 nt, Artificial Sequence
  Chemically synthesized
agaauguggaaaaggccugucag

SEQ ID NO: 86040 - RNA, 23 nt, Artificial Sequence
  Chemically synthesized
ccaagaauguggaaaaggccugu

SEQ ID NO: 86041 - RNA, 23 nt, Artificial Sequence
  Chemically synthesized
uacaucacccagcuggcugagaa

SEQ ID NO: 86042 - RNA, 23 nt, Artificial Sequence
  Chemically synthesized
gucugugcacaucuacaucaccc

SEQ ID NO: 86043 - RNA, 23 nt, Artificial Sequence
  Chemically synthesized
agauacccaaagcuguaccuuga

SEQ ID NO: 86044 - RNA, 23 nt, Artificial Sequence
  Chemically synthesized
uguggaguccauguucucucugg

SEQ ID NO: 86045 - RNA, 23 nt, Artificial Sequence
  Chemically synthesized
aagaauguggaaaaggccuguca

SEQ ID NO: 86046 - RNA, 23 nt, Artificial Sequence
  Chemically synthesized
cuuugagcccuucuucaacuccc

SEQ ID NO: 86047 - RNA, 23 nt, Artificial Sequence
  Chemically synthesized
aaacacucccggaguauacagga

SEQ ID NO: 86048 - RNA, 23 nt, Artificial Sequence
  Chemically synthesized
gggcaaagugaaaccucugcuuc

SEQ ID NO: 86049 - RNA, 23 nt, Artificial Sequence
  Chemically synthesized
ugagaaguucgaccucaggacca

SEQ ID NO: 86050 - RNA, 23 nt, Artificial Sequence
  Chemically synthesized
auuccaggacaaggaggaacuga

SEQ ID NO: 86051 - RNA, 23 nt, Artificial Sequence
  Chemically synthesized
cauuuccaaggaugaguucauca

SEQ ID NO: 86052 - RNA, 23 nt, Artificial Sequence
  Chemically synthesized
uggaguccauguucucucuggcu

SEQ ID NO: 86053 - RNA, 23 nt, Artificial Sequence
  Chemically synthesized
uaugcaaugcuccucagcccucu

SEQ ID NO: 86054 - RNA, 23 nt, Artificial Sequence
  Chemically synthesized
ggauuccaggacaaggaggaacu

SEQ ID NO: 86055 - RNA, 23 nt, Artificial Sequence
  Chemically synthesized
aggcaccuccuggagaccuuuuu

SEQ ID NO: 86056 - RNA, 23 nt, Artificial Sequence
  Chemically synthesized
cauguguugguugaagaugugcg

SEQ ID NO: 86057 - RNA, 23 nt, Artificial Sequence
  Chemically synthesized
uucaagucauccgucagcugcca

SEQ ID NO: 86058 - RNA, 23 nt, Artificial Sequence
  Chemically synthesized
aggacuuauccuggcuagagcug

SEQ ID NO: 86059 - RNA, 23 nt, Artificial Sequence
  Chemically synthesized
caaaucucagaagacaagcugac

SEQ ID NO: 86060 - RNA, 23 nt, Artificial Sequence
  Chemically synthesized
auccugcucuauguccugcucau

SEQ ID NO: 86061 - RNA, 23 nt, Artificial Sequence
  Chemically synthesized
augucuuugccucccaccacuuc

SEQ ID NO: 86062 - RNA, 23 nt, Artificial Sequence
  Chemically synthesized
cauuccagcccuugcuguucacu

SEQ ID NO: 86063 - RNA, 23 nt, Artificial Sequence
  Chemically synthesized
gauaugaucugucccucucccag

SEQ ID NO: 86064 - RNA, 23 nt, Artificial Sequence
  Chemically synthesized
cagaaggucaacuucguccuguc

SEQ ID NO: 86065 - RNA, 23 nt, Artificial Sequence
  Chemically synthesized
aauuucaagaggcuccagggcca

SEQ ID NO: 86066 - RNA, 23 nt, Artificial Sequence
  Chemically synthesized
cucuguugcuucccuuuggugag

SEQ ID NO: 86067 - RNA, 23 nt, Artificial Sequence
  Chemically synthesized
auuucccaccucccaaccuuguu

SEQ ID NO: 86068 - RNA, 23 nt, Artificial Sequence
  Chemically synthesized
gaccacuaugcuguacaucugug

SEQ ID NO: 86069 - RNA, 23 nt, Artificial Sequence
  Chemically synthesized
ucuucaagucauccgucagcugc

SEQ ID NO: 86070 - RNA, 23 nt, Artificial Sequence
  Chemically synthesized
ucuucuuccuggucccagcaauc

SEQ ID NO: 86071 - RNA, 23 nt, Artificial Sequence
  Chemically synthesized
aguauuacuggugguucuuccag

SEQ ID NO: 86072 - RNA, 23 nt, Artificial Sequence
  Chemically synthesized
ucuugccucuuuccuggccucuu

SEQ ID NO: 86073 - RNA, 23 nt, Artificial Sequence
  Chemically synthesized
aguugacaccucagagacugcag

SEQ ID NO: 86074 - RNA, 23 nt, Artificial Sequence
  Chemically synthesized
uguugcuucccuuuggugagccu

SEQ ID NO: 86075 - RNA, 23 nt, Artificial Sequence
  Chemically synthesized
aagaaauccgaaauaccacccug

SEQ ID NO: 86076 - RNA, 23 nt, Artificial Sequence
  Chemically synthesized
ucagcauccugaugaacucaucc

SEQ ID NO: 86077 - RNA, 23 nt, Artificial Sequence
  Chemically synthesized
uccacaucuucagcacuuuguag

SEQ ID NO: 86078 - RNA, 23 nt, Artificial Sequence
  Chemically synthesized
uagugguccugaggucgaacuuc

SEQ ID NO: 86079 - RNA, 23 nt, Artificial Sequence
  Chemically synthesized
ugaugugcggcaaaggcguagua

SEQ ID NO: 86080 - RNA, 23 nt, Artificial Sequence
  Chemically synthesized
uuggcagcugacggaugacuuga

SEQ ID NO: 86081 - RNA, 23 nt, Artificial Sequence
  Chemically synthesized
uccaugcucccacugcauccuua

SEQ ID NO: 86082 - RNA, 23 nt, Artificial Sequence
  Chemically synthesized
uugcugggaccaggaagaagaug

SEQ ID NO: 86083 - RNA, 23 nt, Artificial Sequence
  Chemically synthesized
uauuguggucccgcagcaugaag

SEQ ID NO: 86084 - RNA, 23 nt, Artificial Sequence
  Chemically synthesized
uggacaggacgaaguugaccuuc

SEQ ID NO: 86085 - RNA, 23 nt, Artificial Sequence
  Chemically synthesized
aacagcagcaccaggucauacuc

SEQ ID NO: 86086 - RNA, 23 nt, Artificial Sequence
  Chemically synthesized
accagaaguguccaugcuagagc

SEQ ID NO: 86087 - RNA, 23 nt, Artificial Sequence
  Chemically synthesized
ucugggagagggacagaucauau

SEQ ID NO: 86088 - RNA, 23 nt, Artificial Sequence
  Chemically synthesized
augggaguagggaggguucuaag

SEQ ID NO: 86089 - RNA, 23 nt, Artificial Sequence
  Chemically synthesized
auccaugcucccacugcauccuu

SEQ ID NO: 86090 - RNA, 23 nt, Artificial Sequence
  Chemically synthesized
ugaugucagccagccacucaaac

SEQ ID NO: 86091 - RNA, 23 nt, Artificial Sequence
  Chemically synthesized
uuuccacgcucaccaggucugaa

SEQ ID NO: 86092 - RNA, 23 nt, Artificial Sequence
  Chemically synthesized
ugggaggugggaaaucagagaag

SEQ ID NO: 86093 - RNA, 23 nt, Artificial Sequence
  Chemically synthesized
agcagcucuagccaggauaaguc

SEQ ID NO: 86094 - RNA, 23 nt, Artificial Sequence
  Chemically synthesized
acaagguugggaggugggaaauc

SEQ ID NO: 86095 - RNA, 23 nt, Artificial Sequence
  Chemically synthesized
augugcggcaaaggcguaguagu

SEQ ID NO: 86096 - RNA, 23 nt, Artificial Sequence
  Chemically synthesized
auugggccagggucugaugaaag

SEQ ID NO: 86097 - RNA, 23 nt, Artificial Sequence
  Chemically synthesized
ucaccaaagggaagcaacagagg

SEQ ID NO: 86098 - RNA, 23 nt, Artificial Sequence
  Chemically synthesized
uaggaagaacagaggugaggugu

SEQ ID NO: 86099 - RNA, 23 nt, Artificial Sequence
  Chemically synthesized
uucuggaagugccgcucacagau

SEQ ID NO: 86100 - RNA, 23 nt, Artificial Sequence
  Chemically synthesized
auuguggucccgcagcaugaagu

SEQ ID NO: 86101 - RNA, 23 nt, Artificial Sequence
  Chemically synthesized
ucccgcagcaugaagugaaaauc

SEQ ID NO: 86102 - RNA, 23 nt, Artificial Sequence
  Chemically synthesized
aacagcaagggcuggaaugacgu

SEQ ID NO: 86103 - RNA, 23 nt, Artificial Sequence
  Chemically synthesized
ugcagggugguauuucggauuuc

SEQ ID NO: 86104 - RNA, 23 nt, Artificial Sequence
  Chemically synthesized
agcagugcauccacaucuucagc

SEQ ID NO: 86105 - RNA, 23 nt, Artificial Sequence
  Chemically synthesized
agagguccuugaugacuucaggc

SEQ ID NO: 86106 - RNA, 23 nt, Artificial Sequence
  Chemically synthesized
uggaaguggcagcuggcauuucu

SEQ ID NO: 86107 - RNA, 23 nt, Artificial Sequence
  Chemically synthesized
aagacauugggcugcagagcacu

SEQ ID NO: 86108 - RNA, 23 nt, Artificial Sequence
  Chemically synthesized
ucaaucuccuucuuggagaacag

SEQ ID NO: 86109 - RNA, 23 nt, Artificial Sequence
  Chemically synthesized
ucaaaccaguagcggucaccauc

SEQ ID NO: 86110 - RNA, 23 nt, Artificial Sequence
  Chemically synthesized
ugggcucaaaccucugcucaacu

SEQ ID NO: 86111 - RNA, 23 nt, Artificial Sequence
  Chemically synthesized
uaguaggcccucuccaggaaaag

SEQ ID NO: 86112 - RNA, 23 nt, Artificial Sequence
  Chemically synthesized
uucuugccaaaccuccgccgaau

SEQ ID NO: 86113 - RNA, 23 nt, Artificial Sequence
  Chemically synthesized
aaagacauugggcugcagagcac

SEQ ID NO: 86114 - RNA, 23 nt, Artificial Sequence
  Chemically synthesized
ccuucuuggagaacagcccauuc

SEQ ID NO: 86115 - RNA, 23 nt, Artificial Sequence
  Chemically synthesized
aaucgcugcaccucccacgaaau

SEQ ID NO: 86116 - RNA, 23 nt, Artificial Sequence
  Chemically synthesized
uuccacgcucaccaggucugaaa

SEQ ID NO: 86117 - RNA, 23 nt, Artificial Sequence
  Chemically synthesized
ugccgaguggguuucuguaaaug

SEQ ID NO: 86118 - RNA, 23 nt, Artificial Sequence
  Chemically synthesized
aggaagaacagaggugaggugug

SEQ ID NO: 86119 - RNA, 23 nt, Artificial Sequence
  Chemically synthesized
ugauugcugggaccaggaagaag

SEQ ID NO: 86120 - RNA, 23 nt, Artificial Sequence
  Chemically synthesized
ugcagucucugaggugucaacuc

SEQ ID NO: 86121 - RNA, 23 nt, Artificial Sequence
  Chemically synthesized
cagagguccuugaugacuucagg

SEQ ID NO: 86122 - RNA, 23 nt, Artificial Sequence
  Chemically synthesized
ucuggaagcagagguuucacuuu

SEQ ID NO: 86123 - RNA, 23 nt, Artificial Sequence
  Chemically synthesized
uggcccacacuguguaagacugu

SEQ ID NO: 86124 - RNA, 23 nt, Artificial Sequence
  Chemically synthesized
aagagggcugaggagcauugcau

SEQ ID NO: 86125 - RNA, 23 nt, Artificial Sequence
  Chemically synthesized
cuggaagcagagguuucacuuug

SEQ ID NO: 86126 - RNA, 23 nt, Artificial Sequence
  Chemically synthesized
auguccagcaccugggagaaaag

SEQ ID NO: 86127 - RNA, 23 nt, Artificial Sequence
  Chemically synthesized
aguaguaggcccucuccaggaaa

SEQ ID NO: 86128 - RNA, 23 nt, Artificial Sequence
  Chemically synthesized
gucucugaggugucaacucaguc

SEQ ID NO: 86129 - RNA, 23 nt, Artificial Sequence
  Chemically synthesized
agucuggaagcagagguuucacu

SEQ ID NO: 86130 - RNA, 23 nt, Artificial Sequence
  Chemically synthesized
acuuggcagcugacggaugacuu

SEQ ID NO: 86131 - RNA, 23 nt, Artificial Sequence
  Chemically synthesized
ugagcaggacauagagcaggaug

SEQ ID NO: 86132 - RNA, 23 nt, Artificial Sequence
  Chemically synthesized
ucauggaagaggccaggaaagag

SEQ ID NO: 86133 - RNA, 23 nt, Artificial Sequence
  Chemically synthesized
augaggccauucccaucaaaguc

SEQ ID NO: 86134 - RNA, 23 nt, Artificial Sequence
  Chemically synthesized
uugauguccugccagcggguaau

SEQ ID NO: 86135 - RNA, 23 nt, Artificial Sequence
  Chemically synthesized
ugucaggucagcuugucuucuga

SEQ ID NO: 86136 - RNA, 23 nt, Artificial Sequence
  Chemically synthesized
uacggucuggaagaaccaccagu

SEQ ID NO: 86137 - RNA, 23 nt, Artificial Sequence
  Chemically synthesized
ugagcaagauguaggagaacaug

SEQ ID NO: 86138 - RNA, 23 nt, Artificial Sequence
  Chemically synthesized
gcugacaggccuuuuccacauuc

SEQ ID NO: 86139 - RNA, 23 nt, Artificial Sequence
  Chemically synthesized
ugggaguagggaggguucuaaga

SEQ ID NO: 86140 - RNA, 23 nt, Artificial Sequence
  Chemically synthesized
ugcugggaccaggaagaagaugu

SEQ ID NO: 86141 - RNA, 23 nt, Artificial Sequence
  Chemically synthesized
caucauggaagaggccaggaaag

SEQ ID NO: 86142 - RNA, 23 nt, Artificial Sequence
  Chemically synthesized
ugaacagcaagggcuggaaugac

SEQ ID NO: 86143 - RNA, 23 nt, Artificial Sequence
  Chemically synthesized
ucucggaaggacagguagccauu

SEQ ID NO: 86144 - RNA, 23 nt, Artificial Sequence
  Chemically synthesized
uugauguccagcaccugggagaa

SEQ ID NO: 86145 - RNA, 23 nt, Artificial Sequence
  Chemically synthesized
ugccgcucuuccuccaaguuaaa

SEQ ID NO: 86146 - RNA, 23 nt, Artificial Sequence
  Chemically synthesized
agccaaauccacugcccucaaaa

SEQ ID NO: 86147 - RNA, 23 nt, Artificial Sequence
  Chemically synthesized
aaggcugaggcagccagaaauag

SEQ ID NO: 86148 - RNA, 23 nt, Artificial Sequence
  Chemically synthesized
ugugcggcaaaggcguaguagua

SEQ ID NO: 86149 - RNA, 23 nt, Artificial Sequence
  Chemically synthesized
auguggcgccgguaguucucaau

SEQ ID NO: 86150 - RNA, 23 nt, Artificial Sequence
  Chemically synthesized
uggagaucucgaugaaggaucuc

SEQ ID NO: 86151 - RNA, 23 nt, Artificial Sequence
  Chemically synthesized
ugcggaacauaaggcgagacuuu

SEQ ID NO: 86152 - RNA, 23 nt, Artificial Sequence
  Chemically synthesized
aguggcagcuggcauuucucaug

SEQ ID NO: 86153 - RNA, 23 nt, Artificial Sequence
  Chemically synthesized
agaagcccaugaugaaaauaaua

SEQ ID NO: 86154 - RNA, 23 nt, Artificial Sequence
  Chemically synthesized
aaggugaugagguugcggcacau

SEQ ID NO: 86155 - RNA, 23 nt, Artificial Sequence
  Chemically synthesized
uggaagcagagguuucacuuugc

SEQ ID NO: 86156 - RNA, 23 nt, Artificial Sequence
  Chemically synthesized
cugacaggccuuuuccacauucu

SEQ ID NO: 86157 - RNA, 23 nt, Artificial Sequence
  Chemically synthesized
acaggccuuuuccacauucuugg

SEQ ID NO: 86158 - RNA, 23 nt, Artificial Sequence
  Chemically synthesized
uucucagccagcugggugaugua

SEQ ID NO: 86159 - RNA, 23 nt, Artificial Sequence
  Chemically synthesized
gggugauguagaugugcacagac

SEQ ID NO: 86160 - RNA, 23 nt, Artificial Sequence
  Chemically synthesized
ucaagguacagcuuuggguaucu

SEQ ID NO: 86161 - RNA, 23 nt, Artificial Sequence
  Chemically synthesized
ccagagagaacauggacuccaca

SEQ ID NO: 86162 - RNA, 23 nt, Artificial Sequence
  Chemically synthesized
ugacaggccuuuuccacauucuu

SEQ ID NO: 86163 - RNA, 23 nt, Artificial Sequence
  Chemically synthesized
gggaguugaagaagggcucaaag

SEQ ID NO: 86164 - RNA, 23 nt, Artificial Sequence
  Chemically synthesized
uccuguauacuccgggaguguuu

SEQ ID NO: 86165 - RNA, 23 nt, Artificial Sequence
  Chemically synthesized
gaagcagagguuucacuuugccc

SEQ ID NO: 86166 - RNA, 23 nt, Artificial Sequence
  Chemically synthesized
ugguccugaggucgaacuucuca

SEQ ID NO: 86167 - RNA, 23 nt, Artificial Sequence
  Chemically synthesized
ucaguuccuccuuguccuggaau

SEQ ID NO: 86168 - RNA, 23 nt, Artificial Sequence
  Chemically synthesized
ugaugaacucauccuuggaaaug

SEQ ID NO: 86169 - RNA, 23 nt, Artificial Sequence
  Chemically synthesized
agccagagagaacauggacucca

SEQ ID NO: 86170 - RNA, 23 nt, Artificial Sequence
  Chemically synthesized
agagggcugaggagcauugcaua

SEQ ID NO: 86171 - RNA, 23 nt, Artificial Sequence
  Chemically synthesized
aguuccuccuuguccuggaaucc

SEQ ID NO: 86172 - RNA, 23 nt, Artificial Sequence
  Chemically synthesized
aaaaaggucuccaggaggugccu

SEQ ID NO: 86173 - RNA, 23 nt, Artificial Sequence
  Chemically synthesized
cgcacaucuucaaccaacacaug

SEQ ID NO: 86174 - RNA, 23 nt, Artificial Sequence
  Chemically synthesized
uggcagcugacggaugacuugaa

SEQ ID NO: 86175 - RNA, 23 nt, Artificial Sequence
  Chemically synthesized
cagcucuagccaggauaaguccu

SEQ ID NO: 86176 - RNA, 23 nt, Artificial Sequence
  Chemically synthesized
gucagcuugucuucugagauuug

SEQ ID NO: 86177 - RNA, 23 nt, Artificial Sequence
  Chemically synthesized
augagcaggacauagagcaggau

SEQ ID NO: 86178 - RNA, 23 nt, Artificial Sequence
  Chemically synthesized
gaaguggugggaggcaaagacau

SEQ ID NO: 86179 - RNA, 23 nt, Artificial Sequence
  Chemically synthesized
agugaacagcaagggcuggaaug

SEQ ID NO: 86180 - RNA, 23 nt, Artificial Sequence
  Chemically synthesized
cugggagagggacagaucauauc

SEQ ID NO: 86181 - RNA, 23 nt, Artificial Sequence
  Chemically synthesized
gacaggacgaaguugaccuucug

SEQ ID NO: 86182 - RNA, 23 nt, Artificial Sequence
  Chemically synthesized
uggcccuggagccucuugaaauu

SEQ ID NO: 86183 - RNA, 23 nt, Artificial Sequence
  Chemically synthesized
cucaccaaagggaagcaacagag

SEQ ID NO: 86184 - RNA, 23 nt, Artificial Sequence
  Chemically synthesized
aacaagguugggaggugggaaau

SEQ ID NO: 86185 - RNA, 23 nt, Artificial Sequence
  Chemically synthesized
cacagauguacagcauagugguc

SEQ ID NO: 86186 - RNA, 23 nt, Artificial Sequence
  Chemically synthesized
gcagcugacggaugacuugaaga

SEQ ID NO: 86187 - RNA, 23 nt, Artificial Sequence
  Chemically synthesized
gauugcugggaccaggaagaaga

SEQ ID NO: 86188 - RNA, 23 nt, Artificial Sequence
  Chemically synthesized
cuggaagaaccaccaguaauacu

SEQ ID NO: 86189 - RNA, 23 nt, Artificial Sequence
  Chemically synthesized
aagaggccaggaaagaggcaaga

SEQ ID NO: 86190 - RNA, 23 nt, Artificial Sequence
  Chemically synthesized
cugcagucucugaggugucaacu

SEQ ID NO: 86191 - RNA, 23 nt, Artificial Sequence
  Chemically synthesized
aggcucaccaaagggaagcaaca

SEQ ID NO: 86192 - RNA, 23 nt, Artificial Sequence
  Chemically synthesized
cagggugguauuucggauuucuu

SEQ ID NO: 86193 - RNA, 23 nt, Artificial Sequence
  Chemically synthesized
aacaccacaacuaauuucaccca

SEQ ID NO: 86194 - RNA, 23 nt, Artificial Sequence
  Chemically synthesized
ccaggacaaggaggaacugacau

SEQ ID NO: 86195 - RNA, 23 nt, Artificial Sequence
  Chemically synthesized
uccaggacaaggaggaacugaca

SEQ ID NO: 86196 - RNA, 23 nt, Artificial Sequence
  Chemically synthesized
cauggaugcuggcaucuuagaac

SEQ ID NO: 86197 - RNA, 23 nt, Artificial Sequence
  Chemically synthesized
gcauggaugcuggcaucuuagaa

SEQ ID NO: 86198 - RNA, 23 nt, Artificial Sequence
  Chemically synthesized
agcauggaugcuggcaucuuaga

SEQ ID NO: 86199 - RNA, 23 nt, Artificial Sequence
  Chemically synthesized
gagcauggaugcuggcaucuuag

SEQ ID NO: 86200 - RNA, 23 nt, Artificial Sequence
  Chemically synthesized
ggagcauggaugcuggcaucuua

SEQ ID NO: 86201 - RNA, 23 nt, Artificial Sequence
  Chemically synthesized
ggaccacuaugcuguacaucugu

SEQ ID NO: 86202 - RNA, 23 nt, Artificial Sequence
  Chemically synthesized
agccgagacagcucagcacugaa

SEQ ID NO: 86203 - RNA, 23 nt, Artificial Sequence
  Chemically synthesized
ucucccggagcaaugacacugua

SEQ ID NO: 86204 - RNA, 23 nt, Artificial Sequence
  Chemically synthesized
gggacuagagugagaaguagggg

SEQ ID NO: 86205 - RNA, 23 nt, Artificial Sequence
  Chemically synthesized
agucuaacaccacaacuaauuuc

SEQ ID NO: 86206 - RNA, 23 nt, Artificial Sequence
  Chemically synthesized
cagucuaacaccacaacuaauuu

SEQ ID NO: 86207 - RNA, 23 nt, Artificial Sequence
  Chemically synthesized
ccagucuaacaccacaacuaauu

SEQ ID NO: 86208 - RNA, 23 nt, Artificial Sequence
  Chemically synthesized
cccagucuaacaccacaacuaau

SEQ ID NO: 86209 - RNA, 23 nt, Artificial Sequence
  Chemically synthesized
ccccagucuaacaccacaacuaa

SEQ ID NO: 86210 - RNA, 23 nt, Artificial Sequence
  Chemically synthesized
guguaaggaugcagugggagcau

SEQ ID NO: 86211 - RNA, 23 nt, Artificial Sequence
  Chemically synthesized
aguguaaggaugcagugggagca

SEQ ID NO: 86212 - RNA, 23 nt, Artificial Sequence
  Chemically synthesized
gaguguaaggaugcagugggagc

SEQ ID NO: 86213 - RNA, 23 nt, Artificial Sequence
  Chemically synthesized
ugaguguaaggaugcagugggag

SEQ ID NO: 86214 - RNA, 23 nt, Artificial Sequence
  Chemically synthesized
gugaguguaaggaugcaguggga

SEQ ID NO: 86215 - RNA, 23 nt, Artificial Sequence
  Chemically synthesized
cggugaguguaaggaugcagugg

SEQ ID NO: 86216 - RNA, 23 nt, Artificial Sequence
  Chemically synthesized
gcggugaguguaaggaugcagug

SEQ ID NO: 86217 - RNA, 23 nt, Artificial Sequence
  Chemically synthesized
ggcggugaguguaaggaugcagu

SEQ ID NO: 86218 - RNA, 23 nt, Artificial Sequence
  Chemically synthesized
gggcggugaguguaaggaugcag

SEQ ID NO: 86219 - RNA, 23 nt, Artificial Sequence
  Chemically synthesized
ggggcggugaguguaaggaugca

SEQ ID NO: 86220 - RNA, 23 nt, Artificial Sequence
  Chemically synthesized
gaagaaauccgaaauaccacccu

SEQ ID NO: 86221 - RNA, 23 nt, Artificial Sequence
  Chemically synthesized
ugaagaaauccgaaauaccaccc

SEQ ID NO: 86222 - RNA, 23 nt, Artificial Sequence
  Chemically synthesized
uugaagaaauccgaaauaccacc

SEQ ID NO: 86223 - RNA, 23 nt, Artificial Sequence
  Chemically synthesized
auugaagaaauccgaaauaccac

SEQ ID NO: 86224 - RNA, 23 nt, Artificial Sequence
  Chemically synthesized
uggagaucagcguggugaaggcg

SEQ ID NO: 86225 - RNA, 23 nt, Artificial Sequence
  Chemically synthesized
guggagaucagcguggugaaggc

SEQ ID NO: 86226 - RNA, 23 nt, Artificial Sequence
  Chemically synthesized
gguggagaucagcguggugaagg

SEQ ID NO: 86227 - RNA, 23 nt, Artificial Sequence
  Chemically synthesized
agguggagaucagcguggugaag

SEQ ID NO: 86228 - RNA, 23 nt, Artificial Sequence
  Chemically synthesized
aagguggagaucagcguggugaa

SEQ ID NO: 86229 - RNA, 23 nt, Artificial Sequence
  Chemically synthesized
cauugagacugaguugacaccuc

SEQ ID NO: 86230 - RNA, 23 nt, Artificial Sequence
  Chemically synthesized
acauugagacugaguugacaccu

SEQ ID NO: 86231 - RNA, 23 nt, Artificial Sequence
  Chemically synthesized
ucuccaagaaggagauugaagaa

SEQ ID NO: 86232 - RNA, 23 nt, Artificial Sequence
  Chemically synthesized
uucuccaagaaggagauugaaga

SEQ ID NO: 86233 - RNA, 23 nt, Artificial Sequence
  Chemically synthesized
gaaccggagucuauucacaggcc

SEQ ID NO: 86234 - RNA, 23 nt, Artificial Sequence
  Chemically synthesized
ugaaccggagucuauucacaggc

SEQ ID NO: 86235 - RNA, 23 nt, Artificial Sequence
  Chemically synthesized
cugaaccggagucuauucacagg

SEQ ID NO: 86236 - RNA, 23 nt, Artificial Sequence
  Chemically synthesized
ucugaaccggagucuauucacag

SEQ ID NO: 86237 - RNA, 23 nt, Artificial Sequence
  Chemically synthesized
uucugaaccggagucuauucaca

SEQ ID NO: 86238 - RNA, 23 nt, Artificial Sequence
  Chemically synthesized
ggaagaagguggagaucagcgug

SEQ ID NO: 86239 - RNA, 23 nt, Artificial Sequence
  Chemically synthesized
gaugugccagauacccaaagcug

SEQ ID NO: 86240 - RNA, 23 nt, Artificial Sequence
  Chemically synthesized
gcuaucacgugcuuucagaccug

SEQ ID NO: 86241 - RNA, 23 nt, Artificial Sequence
  Chemically synthesized
ggcuaucacgugcuuucagaccu

SEQ ID NO: 86242 - RNA, 23 nt, Artificial Sequence
  Chemically synthesized
uggcuaucacgugcuuucagacc

SEQ ID NO: 86243 - RNA, 23 nt, Artificial Sequence
  Chemically synthesized
uuggcuaucacgugcuuucagac

SEQ ID NO: 86244 - RNA, 23 nt, Artificial Sequence
  Chemically synthesized
uuuggcuaucacgugcuuucaga

SEQ ID NO: 86245 - RNA, 23 nt, Artificial Sequence
  Chemically synthesized
gcauaaguuugaggugucagugu

SEQ ID NO: 86246 - RNA, 23 nt, Artificial Sequence
  Chemically synthesized
cuauuuugagggcaguggauuug

SEQ ID NO: 86247 - RNA, 23 nt, Artificial Sequence
  Chemically synthesized
acuauuuugagggcaguggauuu

SEQ ID NO: 86248 - RNA, 23 nt, Artificial Sequence
  Chemically synthesized
gacuauuuugagggcaguggauu

SEQ ID NO: 86249 - RNA, 23 nt, Artificial Sequence
  Chemically synthesized
ccuauuucuggcugccucagccu

SEQ ID NO: 86250 - RNA, 23 nt, Artificial Sequence
  Chemically synthesized
uccuauuucuggcugccucagcc

SEQ ID NO: 86251 - RNA, 23 nt, Artificial Sequence
  Chemically synthesized
uuccuauuucuggcugccucagc

SEQ ID NO: 86252 - RNA, 23 nt, Artificial Sequence
  Chemically synthesized
cuuccuauuucuggcugccucag

SEQ ID NO: 86253 - RNA, 23 nt, Artificial Sequence
  Chemically synthesized
ucuuccuauuucuggcugccuca

SEQ ID NO: 86254 - RNA, 23 nt, Artificial Sequence
  Chemically synthesized
guccuugaacaauuugugcggcu

SEQ ID NO: 86255 - RNA, 23 nt, Artificial Sequence
  Chemically synthesized
ccagauacccaaagcuguaccuu

SEQ ID NO: 86256 - RNA, 23 nt, Artificial Sequence
  Chemically synthesized
gccagauacccaaagcuguaccu

SEQ ID NO: 86257 - RNA, 23 nt, Artificial Sequence
  Chemically synthesized
ugccagauacccaaagcuguacc

SEQ ID NO: 86258 - RNA, 23 nt, Artificial Sequence
  Chemically synthesized
gugccagauacccaaagcuguac

SEQ ID NO: 86259 - RNA, 23 nt, Artificial Sequence
  Chemically synthesized
ugugccagauacccaaagcugua

SEQ ID NO: 86260 - RNA, 23 nt, Artificial Sequence
  Chemically synthesized
acaucacacgggcaucacagaca

SEQ ID NO: 86261 - RNA, 23 nt, Artificial Sequence
  Chemically synthesized
cacaucacacgggcaucacagac

SEQ ID NO: 86262 - RNA, 23 nt, Artificial Sequence
  Chemically synthesized
gcacaucacacgggcaucacaga

SEQ ID NO: 86263 - RNA, 23 nt, Artificial Sequence
  Chemically synthesized
cgcacaucacacgggcaucacag

SEQ ID NO: 86264 - RNA, 23 nt, Artificial Sequence
  Chemically synthesized
ccgcacaucacacgggcaucaca

SEQ ID NO: 86265 - RNA, 23 nt, Artificial Sequence
  Chemically synthesized
ggaaugggcuguucuccaagaag

SEQ ID NO: 86266 - RNA, 23 nt, Artificial Sequence
  Chemically synthesized
aggaaugggcuguucuccaagaa

SEQ ID NO: 86267 - RNA, 23 nt, Artificial Sequence
  Chemically synthesized
caggaaugggcuguucuccaaga

SEQ ID NO: 86268 - RNA, 23 nt, Artificial Sequence
  Chemically synthesized
ccaggaaugggcuguucuccaag

SEQ ID NO: 86269 - RNA, 23 nt, Artificial Sequence
  Chemically synthesized
accaggaaugggcuguucuccaa

SEQ ID NO: 86270 - RNA, 23 nt, Artificial Sequence
  Chemically synthesized
gucuaacaccacaacuaauuuca

SEQ ID NO: 86271 - RNA, 23 nt, Artificial Sequence
  Chemically synthesized
cugauuucccaccucccaaccuu

SEQ ID NO: 86272 - RNA, 23 nt, Artificial Sequence
  Chemically synthesized
ucugauuucccaccucccaaccu

SEQ ID NO: 86273 - RNA, 23 nt, Artificial Sequence
  Chemically synthesized
cucugauuucccaccucccaacc

SEQ ID NO: 86274 - RNA, 23 nt, Artificial Sequence
  Chemically synthesized
ucucugauuucccaccucccaac

SEQ ID NO: 86275 - RNA, 23 nt, Artificial Sequence
  Chemically synthesized
uucucugauuucccaccucccaa

SEQ ID NO: 86276 - RNA, 23 nt, Artificial Sequence
  Chemically synthesized
uggcaugaccaagaauguggaaa

SEQ ID NO: 86277 - RNA, 23 nt, Artificial Sequence
  Chemically synthesized
cuggcaugaccaagaauguggaa

SEQ ID NO: 86278 - RNA, 23 nt, Artificial Sequence
  Chemically synthesized
ccuggcaugaccaagaaugugga

SEQ ID NO: 86279 - RNA, 23 nt, Artificial Sequence
  Chemically synthesized
gagagguggaggagaaugaccac

SEQ ID NO: 86280 - RNA, 23 nt, Artificial Sequence
  Chemically synthesized
cgagagguggaggagaaugacca

SEQ ID NO: 86281 - RNA, 23 nt, Artificial Sequence
  Chemically synthesized
ccgagagguggaggagaaugacc

SEQ ID NO: 86282 - RNA, 23 nt, Artificial Sequence
  Chemically synthesized
uccgagagguggaggagaaugac

SEQ ID NO: 86283 - RNA, 23 nt, Artificial Sequence
  Chemically synthesized
auccgagagguggaggagaauga

SEQ ID NO: 86284 - RNA, 23 nt, Artificial Sequence
  Chemically synthesized
gaugagagcagcugugacacggg

SEQ ID NO: 86285 - RNA, 23 nt, Artificial Sequence
  Chemically synthesized
ugaugagagcagcugugacacgg

SEQ ID NO: 86286 - RNA, 23 nt, Artificial Sequence
  Chemically synthesized
cugaugagagcagcugugacacg

SEQ ID NO: 86287 - RNA, 23 nt, Artificial Sequence
  Chemically synthesized
gcugaugagagcagcugugacac

SEQ ID NO: 86288 - RNA, 23 nt, Artificial Sequence
  Chemically synthesized
agcugaugagagcagcugugaca

SEQ ID NO: 86289 - RNA, 23 nt, Artificial Sequence
  Chemically synthesized
caucauccaugguagcuuugccc

SEQ ID NO: 86290 - RNA, 23 nt, Artificial Sequence
  Chemically synthesized
agaagguaacgucauuccagccc

SEQ ID NO: 86291 - RNA, 23 nt, Artificial Sequence
  Chemically synthesized
aagaagguaacgucauuccagcc

SEQ ID NO: 86292 - RNA, 23 nt, Artificial Sequence
  Chemically synthesized
ccgcagcgacauugagacugagu

SEQ ID NO: 86293 - RNA, 23 nt, Artificial Sequence
  Chemically synthesized
cccgcagcgacauugagacugag

SEQ ID NO: 86294 - RNA, 23 nt, Artificial Sequence
  Chemically synthesized
ucccgcagcgacauugagacuga

SEQ ID NO: 86295 - RNA, 23 nt, Artificial Sequence
  Chemically synthesized
cacgcagcucugugucaaagggg

SEQ ID NO: 86296 - RNA, 23 nt, Artificial Sequence
  Chemically synthesized
ucacgcagcucugugucaaaggg

SEQ ID NO: 86297 - RNA, 23 nt, Artificial Sequence
  Chemically synthesized
uucacgcagcucugugucaaagg

SEQ ID NO: 86298 - RNA, 23 nt, Artificial Sequence
  Chemically synthesized
cuucacgcagcucugugucaaag

SEQ ID NO: 86299 - RNA, 23 nt, Artificial Sequence
  Chemically synthesized
gcuucacgcagcucugugucaaa

SEQ ID NO: 86300 - RNA, 23 nt, Artificial Sequence
  Chemically synthesized
gcagauccgugugguagauggca

SEQ ID NO: 86301 - RNA, 23 nt, Artificial Sequence
  Chemically synthesized
ggcagauccgugugguagauggc

SEQ ID NO: 86302 - RNA, 23 nt, Artificial Sequence
  Chemically synthesized
gggcagauccgugugguagaugg

SEQ ID NO: 86303 - RNA, 23 nt, Artificial Sequence
  Chemically synthesized
cgggcagauccgugugguagaug

SEQ ID NO: 86304 - RNA, 23 nt, Artificial Sequence
  Chemically synthesized
ccgggcagauccgugugguagau

SEQ ID NO: 86305 - RNA, 23 nt, Artificial Sequence
  Chemically synthesized
ggcuguucuccaagaaggagauu

SEQ ID NO: 86306 - RNA, 23 nt, Artificial Sequence
  Chemically synthesized
gggcuguucuccaagaaggagau

SEQ ID NO: 86307 - RNA, 23 nt, Artificial Sequence
  Chemically synthesized
ugggcuguucuccaagaaggaga

SEQ ID NO: 86308 - RNA, 23 nt, Artificial Sequence
  Chemically synthesized
augggcuguucuccaagaaggag

SEQ ID NO: 86309 - RNA, 23 nt, Artificial Sequence
  Chemically synthesized
aaugggcuguucuccaagaagga

SEQ ID NO: 86310 - RNA, 23 nt, Artificial Sequence
  Chemically synthesized
ggacuagagugagaaguagggga

SEQ ID NO: 86311 - RNA, 23 nt, Artificial Sequence
  Chemically synthesized
gaugugucucagccuggagaaau

SEQ ID NO: 86312 - RNA, 23 nt, Artificial Sequence
  Chemically synthesized
ggaugugucucagccuggagaaa

SEQ ID NO: 86313 - RNA, 23 nt, Artificial Sequence
  Chemically synthesized
gauuugaugggugguacaacaac

SEQ ID NO: 86314 - RNA, 23 nt, Artificial Sequence
  Chemically synthesized
gguucugaaccggagucuauuca

SEQ ID NO: 86315 - RNA, 23 nt, Artificial Sequence
  Chemically synthesized
agguucugaaccggagucuauuc

SEQ ID NO: 86316 - RNA, 23 nt, Artificial Sequence
  Chemically synthesized
aagguucugaaccggagucuauu

SEQ ID NO: 86317 - RNA, 23 nt, Artificial Sequence
  Chemically synthesized
gaagguucugaaccggagucuau

SEQ ID NO: 86318 - RNA, 23 nt, Artificial Sequence
  Chemically synthesized
guuugagaacaccaggaaugggc

SEQ ID NO: 86319 - RNA, 23 nt, Artificial Sequence
  Chemically synthesized
aacccucccuacucccauaccuc

SEQ ID NO: 86320 - RNA, 23 nt, Artificial Sequence
  Chemically synthesized
gaacccucccuacucccauaccu

SEQ ID NO: 86321 - RNA, 23 nt, Artificial Sequence
  Chemically synthesized
agaacccucccuacucccauacc

SEQ ID NO: 86322 - RNA, 23 nt, Artificial Sequence
  Chemically synthesized
uagaacccucccuacucccauac

SEQ ID NO: 86323 - RNA, 23 nt, Artificial Sequence
  Chemically synthesized
uuagaacccucccuacucccaua

SEQ ID NO: 86324 - RNA, 23 nt, Artificial Sequence
  Chemically synthesized
uggaugcuggcaucuuagaaccc

SEQ ID NO: 86325 - RNA, 23 nt, Artificial Sequence
  Chemically synthesized
auggaugcuggcaucuuagaacc

SEQ ID NO: 86326 - RNA, 23 nt, Artificial Sequence
  Chemically synthesized
uuugaugggugguacaacaaccu

SEQ ID NO: 86327 - RNA, 23 nt, Artificial Sequence
  Chemically synthesized
auuugaugggugguacaacaacc

SEQ ID NO: 86328 - RNA, 23 nt, Artificial Sequence
  Chemically synthesized
gugacagaugugccagauaccca

SEQ ID NO: 86329 - RNA, 23 nt, Artificial Sequence
  Chemically synthesized
guagcuuugcccugauccagcug

SEQ ID NO: 86330 - RNA, 23 nt, Artificial Sequence
  Chemically synthesized
gguagcuuugcccugauccagcu

SEQ ID NO: 86331 - RNA, 23 nt, Artificial Sequence
  Chemically synthesized
ggaaaagucucgccuuauguucc

SEQ ID NO: 86332 - RNA, 23 nt, Artificial Sequence
  Chemically synthesized
gaagcuuuggaauggcaaggcca

SEQ ID NO: 86333 - RNA, 23 nt, Artificial Sequence
  Chemically synthesized
cggccccagggcuuugaguacaa

SEQ ID NO: 86334 - RNA, 23 nt, Artificial Sequence
  Chemically synthesized
caggauaccggccauuucuggac

SEQ ID NO: 86335 - RNA, 23 nt, Artificial Sequence
  Chemically synthesized
acaggauaccggccauuucugga

SEQ ID NO: 86336 - RNA, 23 nt, Artificial Sequence
  Chemically synthesized
uacaggauaccggccauuucugg

SEQ ID NO: 86337 - RNA, 23 nt, Artificial Sequence
  Chemically synthesized
caagcugaccugacaaguacuau

SEQ ID NO: 86338 - RNA, 23 nt, Artificial Sequence
  Chemically synthesized
acaagcugaccugacaaguacua

SEQ ID NO: 86339 - RNA, 23 nt, Artificial Sequence
  Chemically synthesized
guucugaaccggagucuauucac

SEQ ID NO: 86340 - RNA, 23 nt, Artificial Sequence
  Chemically synthesized
uucaugaaaggcucuccugagga

SEQ ID NO: 86341 - RNA, 23 nt, Artificial Sequence
  Chemically synthesized
cuucaugaaaggcucuccugagg

SEQ ID NO: 86342 - RNA, 23 nt, Artificial Sequence
  Chemically synthesized
ucuucaugaaaggcucuccugag

SEQ ID NO: 86343 - RNA, 23 nt, Artificial Sequence
  Chemically synthesized
gucuucaugaaaggcucuccuga

SEQ ID NO: 86344 - RNA, 23 nt, Artificial Sequence
  Chemically synthesized
cuuugucuggcauaaaggagacc

SEQ ID NO: 86345 - RNA, 23 nt, Artificial Sequence
  Chemically synthesized
ucuuugucuggcauaaaggagac

SEQ ID NO: 86346 - RNA, 23 nt, Artificial Sequence
  Chemically synthesized
ugaaguuuucccgcacagaccac

SEQ ID NO: 86347 - RNA, 23 nt, Artificial Sequence
  Chemically synthesized
cugaaguuuucccgcacagacca

SEQ ID NO: 86348 - RNA, 23 nt, Artificial Sequence
  Chemically synthesized
ucugguuccgcuaccacaaccug

SEQ ID NO: 86349 - RNA, 23 nt, Artificial Sequence
  Chemically synthesized
cucugguuccgcuaccacaaccu

SEQ ID NO: 86350 - RNA, 23 nt, Artificial Sequence
  Chemically synthesized
gcucugguuccgcuaccacaacc

SEQ ID NO: 86351 - RNA, 23 nt, Artificial Sequence
  Chemically synthesized
ugcucugguuccgcuaccacaac

SEQ ID NO: 86352 - RNA, 23 nt, Artificial Sequence
  Chemically synthesized
cugcucugguuccgcuaccacaa

SEQ ID NO: 86353 - RNA, 23 nt, Artificial Sequence
  Chemically synthesized
accccagucuaacaccacaacua

SEQ ID NO: 86354 - RNA, 23 nt, Artificial Sequence
  Chemically synthesized
cuuccagaagguucugaaccgga

SEQ ID NO: 86355 - RNA, 23 nt, Artificial Sequence
  Chemically synthesized
ucagcguccucucuugccucuuu

SEQ ID NO: 86356 - RNA, 23 nt, Artificial Sequence
  Chemically synthesized
aauuugugcggcuacgggauggu

SEQ ID NO: 86357 - RNA, 23 nt, Artificial Sequence
  Chemically synthesized
caauuugugcggcuacgggaugg

SEQ ID NO: 86358 - RNA, 23 nt, Artificial Sequence
  Chemically synthesized
acaauuugugcggcuacgggaug

SEQ ID NO: 86359 - RNA, 23 nt, Artificial Sequence
  Chemically synthesized
aacaauuugugcggcuacgggau

SEQ ID NO: 86360 - RNA, 23 nt, Artificial Sequence
  Chemically synthesized
uaauuucacccaagguuuuaagc

SEQ ID NO: 86361 - RNA, 23 nt, Artificial Sequence
  Chemically synthesized
uaacaccacaacuaauuucaccc

SEQ ID NO: 86362 - RNA, 23 nt, Artificial Sequence
  Chemically synthesized
cuaacaccacaacuaauuucacc

SEQ ID NO: 86363 - RNA, 23 nt, Artificial Sequence
  Chemically synthesized
ucuaacaccacaacuaauuucac

SEQ ID NO: 86364 - RNA, 23 nt, Artificial Sequence
  Chemically synthesized
cauccaugguagcuuugcccuga

SEQ ID NO: 86365 - RNA, 23 nt, Artificial Sequence
  Chemically synthesized
uggagagggccuacuacuacgcc

SEQ ID NO: 86366 - RNA, 23 nt, Artificial Sequence
  Chemically synthesized
cuggagagggccuacuacuacgc

SEQ ID NO: 86367 - RNA, 23 nt, Artificial Sequence
  Chemically synthesized
ccuggagagggccuacuacuacg

SEQ ID NO: 86368 - RNA, 23 nt, Artificial Sequence
  Chemically synthesized
uccuggagagggccuacuacuac

SEQ ID NO: 86369 - RNA, 23 nt, Artificial Sequence
  Chemically synthesized
uuccuggagagggccuacuacua

SEQ ID NO: 86370 - RNA, 23 nt, Artificial Sequence
  Chemically synthesized
ucacgugcuuucagaccugguga

SEQ ID NO: 86371 - RNA, 23 nt, Artificial Sequence
  Chemically synthesized
gcugaccugacaaguacuaugug

SEQ ID NO: 86372 - RNA, 23 nt, Artificial Sequence
  Chemically synthesized
agcugaccugacaaguacuaugu

SEQ ID NO: 86373 - RNA, 23 nt, Artificial Sequence
  Chemically synthesized
aagcugaccugacaaguacuaug

SEQ ID NO: 86374 - RNA, 23 nt, Artificial Sequence
  Chemically synthesized
uuccuggucccagcaaucaucua

SEQ ID NO: 86375 - RNA, 23 nt, Artificial Sequence
  Chemically synthesized
ggacuuccaucgccucauugccu

SEQ ID NO: 86376 - RNA, 23 nt, Artificial Sequence
  Chemically synthesized
aggaugaguucaucaggaugcug

SEQ ID NO: 86377 - RNA, 23 nt, Artificial Sequence
  Chemically synthesized
aaggaugaguucaucaggaugcu

SEQ ID NO: 86378 - RNA, 23 nt, Artificial Sequence
  Chemically synthesized
caaggaugaguucaucaggaugc

SEQ ID NO: 86379 - RNA, 23 nt, Artificial Sequence
  Chemically synthesized
guccauguucucucuggcugaca

SEQ ID NO: 86380 - RNA, 23 nt, Artificial Sequence
  Chemically synthesized
aguccauguucucucuggcugac

SEQ ID NO: 86381 - RNA, 23 nt, Artificial Sequence
  Chemically synthesized
gaguccauguucucucuggcuga

SEQ ID NO: 86382 - RNA, 23 nt, Artificial Sequence
  Chemically synthesized
gcacucugcugcucaagaucccc

SEQ ID NO: 86383 - RNA, 23 nt, Artificial Sequence
  Chemically synthesized
cgcacucugcugcucaagauccc

SEQ ID NO: 86384 - RNA, 23 nt, Artificial Sequence
  Chemically synthesized
ccgcacucugcugcucaagaucc

SEQ ID NO: 86385 - RNA, 23 nt, Artificial Sequence
  Chemically synthesized
gccgcacucugcugcucaagauc

SEQ ID NO: 86386 - RNA, 23 nt, Artificial Sequence
  Chemically synthesized
cgccgcacucugcugcucaagau

SEQ ID NO: 86387 - RNA, 23 nt, Artificial Sequence
  Chemically synthesized
gaaauaccacccugcaggacgug

SEQ ID NO: 86388 - RNA, 23 nt, Artificial Sequence
  Chemically synthesized
cgaaauaccacccugcaggacgu

SEQ ID NO: 86389 - RNA, 23 nt, Artificial Sequence
  Chemically synthesized
ccgaaauaccacccugcaggacg

SEQ ID NO: 86390 - RNA, 23 nt, Artificial Sequence
  Chemically synthesized
uccgaaauaccacccugcaggac

SEQ ID NO: 86391 - RNA, 23 nt, Artificial Sequence
  Chemically synthesized
auccgaaauaccacccugcagga

SEQ ID NO: 86392 - RNA, 23 nt, Artificial Sequence
  Chemically synthesized
ggucaucgccaccuaccagaaca

SEQ ID NO: 86393 - RNA, 23 nt, Artificial Sequence
  Chemically synthesized
gggucaucgccaccuaccagaac

SEQ ID NO: 86394 - RNA, 23 nt, Artificial Sequence
  Chemically synthesized
agggucaucgccaccuaccagaa

SEQ ID NO: 86395 - RNA, 23 nt, Artificial Sequence
  Chemically synthesized
cuauguaugcaaugcuccucagc

SEQ ID NO: 86396 - RNA, 23 nt, Artificial Sequence
  Chemically synthesized
ccuauguaugcaaugcuccucag

SEQ ID NO: 86397 - RNA, 23 nt, Artificial Sequence
  Chemically synthesized
uuuuaagcacguucuuucaucag

SEQ ID NO: 86398 - RNA, 23 nt, Artificial Sequence
  Chemically synthesized
guuuuaagcacguucuuucauca

SEQ ID NO: 86399 - RNA, 23 nt, Artificial Sequence
  Chemically synthesized
ccuuugagcccuucuucaacucc

SEQ ID NO: 86400 - RNA, 23 nt, Artificial Sequence
  Chemically synthesized
gcuguacaucugugagcggcacu

SEQ ID NO: 86401 - RNA, 23 nt, Artificial Sequence
  Chemically synthesized
ugcuguacaucugugagcggcac

SEQ ID NO: 86402 - RNA, 23 nt, Artificial Sequence
  Chemically synthesized
augcuguacaucugugagcggca

SEQ ID NO: 86403 - RNA, 23 nt, Artificial Sequence
  Chemically synthesized
gugucugugcacaucuacaucac

SEQ ID NO: 86404 - RNA, 23 nt, Artificial Sequence
  Chemically synthesized
ggugucugugcacaucuacauca

SEQ ID NO: 86405 - RNA, 23 nt, Artificial Sequence
  Chemically synthesized
aaggcucuccugaggaaaagucu

SEQ ID NO: 86406 - RNA, 23 nt, Artificial Sequence
  Chemically synthesized
aaaggcucuccugaggaaaaguc

SEQ ID NO: 86407 - RNA, 23 nt, Artificial Sequence
  Chemically synthesized
cucuguucagcaccaucguccuu

SEQ ID NO: 86408 - RNA, 23 nt, Artificial Sequence
  Chemically synthesized
ccucuguucagcaccaucguccu

SEQ ID NO: 86409 - RNA, 23 nt, Artificial Sequence
  Chemically synthesized
accucuguucagcaccaucgucc

SEQ ID NO: 86410 - RNA, 23 nt, Artificial Sequence
  Chemically synthesized
aguuuucccgcacagaccaccug

SEQ ID NO: 86411 - RNA, 23 nt, Artificial Sequence
  Chemically synthesized
aaguuuucccgcacagaccaccu

SEQ ID NO: 86412 - RNA, 23 nt, Artificial Sequence
  Chemically synthesized
gaaguuuucccgcacagaccacc

SEQ ID NO: 86413 - RNA, 23 nt, Artificial Sequence
  Chemically synthesized
caaagugcugaagauguggaugc

SEQ ID NO: 86414 - RNA, 23 nt, Artificial Sequence
  Chemically synthesized
acaaagugcugaagauguggaug

SEQ ID NO: 86415 - RNA, 23 nt, Artificial Sequence
  Chemically synthesized
uacaaagugcugaagauguggau

SEQ ID NO: 86416 - RNA, 23 nt, Artificial Sequence
  Chemically synthesized
ccaagccuacaaagugcugaaga

SEQ ID NO: 86417 - RNA, 23 nt, Artificial Sequence
  Chemically synthesized
ggugaguguaaggaugcaguggg

SEQ ID NO: 86418 - RNA, 23 nt, Artificial Sequence
  Chemically synthesized
caaguacuaugugugugcauguc

SEQ ID NO: 86419 - RNA, 23 nt, Artificial Sequence
  Chemically synthesized
acaaguacuaugugugugcaugu

SEQ ID NO: 86420 - RNA, 23 nt, Artificial Sequence
  Chemically synthesized
gacaaguacuaugugugugcaug

SEQ ID NO: 86421 - RNA, 23 nt, Artificial Sequence
  Chemically synthesized
ugacaaguacuaugugugugcau

SEQ ID NO: 86422 - RNA, 23 nt, Artificial Sequence
  Chemically synthesized
cugacaaguacuaugugugugca

SEQ ID NO: 86423 - RNA, 23 nt, Artificial Sequence
  Chemically synthesized
ggugucaguguuagugggagggg

SEQ ID NO: 86424 - RNA, 23 nt, Artificial Sequence
  Chemically synthesized
aggugucaguguuagugggaggg

SEQ ID NO: 86425 - RNA, 23 nt, Artificial Sequence
  Chemically synthesized
gaggugucaguguuagugggagg

SEQ ID NO: 86426 - RNA, 23 nt, Artificial Sequence
  Chemically synthesized
ccugauccuggccaucauguaug

SEQ ID NO: 86427 - RNA, 23 nt, Artificial Sequence
  Chemically synthesized
uccugauccuggccaucauguau

SEQ ID NO: 86428 - RNA, 23 nt, Artificial Sequence
  Chemically synthesized
cuccugauccuggccaucaugua

SEQ ID NO: 86429 - RNA, 23 nt, Artificial Sequence
  Chemically synthesized
gcuccugauccuggccaucaugu

SEQ ID NO: 86430 - RNA, 23 nt, Artificial Sequence
  Chemically synthesized
ugcuccugauccuggccaucaug

SEQ ID NO: 86431 - RNA, 23 nt, Artificial Sequence
  Chemically synthesized
cugcuccugauccuggccaucau

SEQ ID NO: 86432 - RNA, 23 nt, Artificial Sequence
  Chemically synthesized
agcccuugcuguucacugaggcg

SEQ ID NO: 86433 - RNA, 23 nt, Artificial Sequence
  Chemically synthesized
cagcccuugcuguucacugaggc

SEQ ID NO: 86434 - RNA, 23 nt, Artificial Sequence
  Chemically synthesized
ccagcccuugcuguucacugagg

SEQ ID NO: 86435 - RNA, 23 nt, Artificial Sequence
  Chemically synthesized
uccagcccuugcuguucacugag

SEQ ID NO: 86436 - RNA, 23 nt, Artificial Sequence
  Chemically synthesized
uuccagcccuugcuguucacuga

SEQ ID NO: 86437 - RNA, 23 nt, Artificial Sequence
  Chemically synthesized
gaaaagucucgccuuauguuccg

SEQ ID NO: 86438 - RNA, 23 nt, Artificial Sequence
  Chemically synthesized
caaggauggcaauggcuaccugu

SEQ ID NO: 86439 - RNA, 23 nt, Artificial Sequence
  Chemically synthesized
acaaggauggcaauggcuaccug

SEQ ID NO: 86440 - RNA, 23 nt, Artificial Sequence
  Chemically synthesized
gacaaggauggcaauggcuaccu

SEQ ID NO: 86441 - RNA, 23 nt, Artificial Sequence
  Chemically synthesized
ugacaaggauggcaauggcuacc

SEQ ID NO: 86442 - RNA, 23 nt, Artificial Sequence
  Chemically synthesized
cugacaaggauggcaauggcuac

SEQ ID NO: 86443 - RNA, 23 nt, Artificial Sequence
  Chemically synthesized
ccuuuuucaggcaccuuuucucc

SEQ ID NO: 86444 - RNA, 23 nt, Artificial Sequence
  Chemically synthesized
accuuuuucaggcaccuuuucuc

SEQ ID NO: 86445 - RNA, 23 nt, Artificial Sequence
  Chemically synthesized
gaccuuuuucaggcaccuuuucu

SEQ ID NO: 86446 - RNA, 23 nt, Artificial Sequence
  Chemically synthesized
agaccuuuuucaggcaccuuuuc

SEQ ID NO: 86447 - RNA, 23 nt, Artificial Sequence
  Chemically synthesized
gagaccuuuuucaggcaccuuuu

SEQ ID NO: 86448 - RNA, 23 nt, Artificial Sequence
  Chemically synthesized
uggugaccgcuacugguuugaga

SEQ ID NO: 86449 - RNA, 23 nt, Artificial Sequence
  Chemically synthesized
augccuugcaggagguagaggcu

SEQ ID NO: 86450 - RNA, 23 nt, Artificial Sequence
  Chemically synthesized
aaugccuugcaggagguagaggc

SEQ ID NO: 86451 - RNA, 23 nt, Artificial Sequence
  Chemically synthesized
aaaugccuugcaggagguagagg

SEQ ID NO: 86452 - RNA, 23 nt, Artificial Sequence
  Chemically synthesized
caaaugccuugcaggagguagag

SEQ ID NO: 86453 - RNA, 23 nt, Artificial Sequence
  Chemically synthesized
gcaaaugccuugcaggagguaga

SEQ ID NO: 86454 - RNA, 23 nt, Artificial Sequence
  Chemically synthesized
cuuguuccagguggccauaguca

SEQ ID NO: 86455 - RNA, 23 nt, Artificial Sequence
  Chemically synthesized
ccuuguuccagguggccauaguc

SEQ ID NO: 86456 - RNA, 23 nt, Artificial Sequence
  Chemically synthesized
accuuguuccagguggccauagu

SEQ ID NO: 86457 - RNA, 23 nt, Artificial Sequence
  Chemically synthesized
aaccuuguuccagguggccauag

SEQ ID NO: 86458 - RNA, 23 nt, Artificial Sequence
  Chemically synthesized
caaccuuguuccagguggccaua

SEQ ID NO: 86459 - RNA, 23 nt, Artificial Sequence
  Chemically synthesized
caccucaccucuguucuuccuau

SEQ ID NO: 86460 - RNA, 23 nt, Artificial Sequence
  Chemically synthesized
acaucauccgagagguggaggag

SEQ ID NO: 86461 - RNA, 23 nt, Artificial Sequence
  Chemically synthesized
gacaucauccgagagguggagga

SEQ ID NO: 86462 - RNA, 23 nt, Artificial Sequence
  Chemically synthesized
ugacaucauccgagagguggagg

SEQ ID NO: 86463 - RNA, 23 nt, Artificial Sequence
  Chemically synthesized
cugacaucauccgagagguggag

SEQ ID NO: 86464 - RNA, 23 nt, Artificial Sequence
  Chemically synthesized
gcugacaucauccgagaggugga

SEQ ID NO: 86465 - RNA, 23 nt, Artificial Sequence
  Chemically synthesized
uggcugacaucauccgagaggug

SEQ ID NO: 86466 - RNA, 23 nt, Artificial Sequence
  Chemically synthesized
cuggcugacaucauccgagaggu

SEQ ID NO: 86467 - RNA, 23 nt, Artificial Sequence
  Chemically synthesized
gcuggcugacaucauccgagagg

SEQ ID NO: 86468 - RNA, 23 nt, Artificial Sequence
  Chemically synthesized
ggcuggcugacaucauccgagag

SEQ ID NO: 86469 - RNA, 23 nt, Artificial Sequence
  Chemically synthesized
uggcuggcugacaucauccgaga

SEQ ID NO: 86470 - RNA, 23 nt, Artificial Sequence
  Chemically synthesized
augugccagauacccaaagcugu

SEQ ID NO: 86471 - RNA, 23 nt, Artificial Sequence
  Chemically synthesized
cucuuccaugaugaugggucuga

SEQ ID NO: 86472 - RNA, 23 nt, Artificial Sequence
  Chemically synthesized
ccucuuccaugaugaugggucug

SEQ ID NO: 86473 - RNA, 23 nt, Artificial Sequence
  Chemically synthesized
gcugacaaggauggcaauggcua

SEQ ID NO: 86474 - RNA, 23 nt, Artificial Sequence
  Chemically synthesized
uauuuugagggcaguggauuugg

SEQ ID NO: 86475 - RNA, 23 nt, Artificial Sequence
  Chemically synthesized
ccugacaaguacuaugugugugc

SEQ ID NO: 86476 - RNA, 23 nt, Artificial Sequence
  Chemically synthesized
accugacaaguacuaugugugug

SEQ ID NO: 86477 - RNA, 23 nt, Artificial Sequence
  Chemically synthesized
gaccugacaaguacuaugugugu

SEQ ID NO: 86478 - RNA, 23 nt, Artificial Sequence
  Chemically synthesized
ugaccugacaaguacuaugugug

SEQ ID NO: 86479 - RNA, 23 nt, Artificial Sequence
  Chemically synthesized
cugaccugacaaguacuaugugu

SEQ ID NO: 86480 - RNA, 23 nt, Artificial Sequence
  Chemically synthesized
cccuggcaugaccaagaaugugg

SEQ ID NO: 86481 - RNA, 23 nt, Artificial Sequence
  Chemically synthesized
ccccuggcaugaccaagaaugug

SEQ ID NO: 86482 - RNA, 23 nt, Artificial Sequence
  Chemically synthesized
cccccuggcaugaccaagaaugu

SEQ ID NO: 86483 - RNA, 23 nt, Artificial Sequence
  Chemically synthesized
ccccccuggcaugaccaagaaug

SEQ ID NO: 86484 - RNA, 23 nt, Artificial Sequence
  Chemically synthesized
gccccccuggcaugaccaagaau

SEQ ID NO: 86485 - RNA, 23 nt, Artificial Sequence
  Chemically synthesized
aaguauuacuggugguucuucca

SEQ ID NO: 86486 - RNA, 23 nt, Artificial Sequence
  Chemically synthesized
gaaguauuacuggugguucuucc

SEQ ID NO: 86487 - RNA, 23 nt, Artificial Sequence
  Chemically synthesized
aucacacgggcaucacagacacc

SEQ ID NO: 86488 - RNA, 23 nt, Artificial Sequence
  Chemically synthesized
caucacacgggcaucacagacac

SEQ ID NO: 86489 - RNA, 23 nt, Artificial Sequence
  Chemically synthesized
agacugaguugacaccucagaga

SEQ ID NO: 86490 - RNA, 23 nt, Artificial Sequence
  Chemically synthesized
gagacugaguugacaccucagag

SEQ ID NO: 86491 - RNA, 23 nt, Artificial Sequence
  Chemically synthesized
ugagacugaguugacaccucaga

SEQ ID NO: 86492 - RNA, 23 nt, Artificial Sequence
  Chemically synthesized
uugagacugaguugacaccucag

SEQ ID NO: 86493 - RNA, 23 nt, Artificial Sequence
  Chemically synthesized
auugagacugaguugacaccuca

SEQ ID NO: 86494 - RNA, 23 nt, Artificial Sequence
  Chemically synthesized
aguuccucaacauucgcaucccg

SEQ ID NO: 86495 - RNA, 23 nt, Artificial Sequence
  Chemically synthesized
gaguuccucaacauucgcauccc

SEQ ID NO: 86496 - RNA, 23 nt, Artificial Sequence
  Chemically synthesized
cgaguuccucaacauucgcaucc

SEQ ID NO: 86497 - RNA, 23 nt, Artificial Sequence
  Chemically synthesized
ucuucucccugcuccaguagucu

SEQ ID NO: 86498 - RNA, 23 nt, Artificial Sequence
  Chemically synthesized
cucuucucccugcuccaguaguc

SEQ ID NO: 86499 - RNA, 23 nt, Artificial Sequence
  Chemically synthesized
ccucuucucccugcuccaguagu

SEQ ID NO: 86500 - RNA, 23 nt, Artificial Sequence
  Chemically synthesized
cccucuucucccugcuccaguag

SEQ ID NO: 86501 - RNA, 23 nt, Artificial Sequence
  Chemically synthesized
gcccucuucucccugcuccagua

SEQ ID NO: 86502 - RNA, 23 nt, Artificial Sequence
  Chemically synthesized
cuaugugugugcaugucuguaug

SEQ ID NO: 86503 - RNA, 23 nt, Artificial Sequence
  Chemically synthesized
acuaugugugugcaugucuguau

SEQ ID NO: 86504 - RNA, 23 nt, Artificial Sequence
  Chemically synthesized
guacuaugugugugcaugucugu

SEQ ID NO: 86505 - RNA, 23 nt, Artificial Sequence
  Chemically synthesized
aguacuaugugugugcaugucug

SEQ ID NO: 86506 - RNA, 23 nt, Artificial Sequence
  Chemically synthesized
uugaugggugguacaacaaccuc

SEQ ID NO: 86507 - RNA, 23 nt, Artificial Sequence
  Chemically synthesized
acuuccagaagguucugaaccgg

SEQ ID NO: 86508 - RNA, 23 nt, Artificial Sequence
  Chemically synthesized
cacuuccagaagguucugaaccg

SEQ ID NO: 86509 - RNA, 23 nt, Artificial Sequence
  Chemically synthesized
gcacuuccagaagguucugaacc

SEQ ID NO: 86510 - RNA, 23 nt, Artificial Sequence
  Chemically synthesized
ccugcucuauguccugcucauca

SEQ ID NO: 86511 - RNA, 23 nt, Artificial Sequence
  Chemically synthesized
cuuccugcgagaaaccuuccuca

SEQ ID NO: 86512 - RNA, 23 nt, Artificial Sequence
  Chemically synthesized
gacauccugguggucuucaugaa

SEQ ID NO: 86513 - RNA, 23 nt, Artificial Sequence
  Chemically synthesized
ggacauccugguggucuucauga

SEQ ID NO: 86514 - RNA, 23 nt, Artificial Sequence
  Chemically synthesized
cgugcuggucgcuguuaucaaca

SEQ ID NO: 86515 - RNA, 23 nt, Artificial Sequence
  Chemically synthesized
gaagaugugcgggauuucuggcc

SEQ ID NO: 86516 - RNA, 23 nt, Artificial Sequence
  Chemically synthesized
ugaagaugugcgggauuucuggc

SEQ ID NO: 86517 - RNA, 23 nt, Artificial Sequence
  Chemically synthesized
uugaagaugugcgggauuucugg

SEQ ID NO: 86518 - RNA, 23 nt, Artificial Sequence
  Chemically synthesized
guugaagaugugcgggauuucug

SEQ ID NO: 86519 - RNA, 23 nt, Artificial Sequence
  Chemically synthesized
cagaagacaagcugaccugacaa

SEQ ID NO: 86520 - RNA, 23 nt, Artificial Sequence
  Chemically synthesized
ggaggagaaugaccaccaggacc

SEQ ID NO: 86521 - RNA, 23 nt, Artificial Sequence
  Chemically synthesized
uggaggagaaugaccaccaggac

SEQ ID NO: 86522 - RNA, 23 nt, Artificial Sequence
  Chemically synthesized
guggaggagaaugaccaccagga

SEQ ID NO: 86523 - RNA, 23 nt, Artificial Sequence
  Chemically synthesized
aguuugaguggcuggcugacauc

SEQ ID NO: 86524 - RNA, 23 nt, Artificial Sequence
  Chemically synthesized
caguuugaguggcuggcugacau

SEQ ID NO: 86525 - RNA, 23 nt, Artificial Sequence
  Chemically synthesized
ucaguuugaguggcuggcugaca

SEQ ID NO: 86526 - RNA, 23 nt, Artificial Sequence
  Chemically synthesized
gucaguuugaguggcuggcugac

SEQ ID NO: 86527 - RNA, 23 nt, Artificial Sequence
  Chemically synthesized
cgucaguuugaguggcuggcuga

SEQ ID NO: 86528 - RNA, 23 nt, Artificial Sequence
  Chemically synthesized
cuuccuggucccagcaaucaucu

SEQ ID NO: 86529 - RNA, 23 nt, Artificial Sequence
  Chemically synthesized
ucuuccuggucccagcaaucauc

SEQ ID NO: 86530 - RNA, 23 nt, Artificial Sequence
  Chemically synthesized
uucuuccuggucccagcaaucau

SEQ ID NO: 86531 - RNA, 23 nt, Artificial Sequence
  Chemically synthesized
auguggugaauguguaccuguuc

SEQ ID NO: 86532 - RNA, 23 nt, Artificial Sequence
  Chemically synthesized
cauguggugaauguguaccuguu

SEQ ID NO: 86533 - RNA, 23 nt, Artificial Sequence
  Chemically synthesized
uuccaggacaaggaggaacugac

SEQ ID NO: 86534 - RNA, 23 nt, Artificial Sequence
  Chemically synthesized
agcuuuggaauggcaaggccaca

SEQ ID NO: 86535 - RNA, 23 nt, Artificial Sequence
  Chemically synthesized
aagcuuuggaauggcaaggccac

SEQ ID NO: 86536 - RNA, 23 nt, Artificial Sequence
  Chemically synthesized
ccgccagagcaucgugucugaga

SEQ ID NO: 86537 - RNA, 23 nt, Artificial Sequence
  Chemically synthesized
guucuccaagaaggagauugaag

SEQ ID NO: 86538 - RNA, 23 nt, Artificial Sequence
  Chemically synthesized
uguucuccaagaaggagauugaa

SEQ ID NO: 86539 - RNA, 23 nt, Artificial Sequence
  Chemically synthesized
agaugugcgggauuucuggccug

SEQ ID NO: 86540 - RNA, 23 nt, Artificial Sequence
  Chemically synthesized
aagaugugcgggauuucuggccu

SEQ ID NO: 86541 - RNA, 23 nt, Artificial Sequence
  Chemically synthesized
aucagacccuggcccaauaccua

SEQ ID NO: 86542 - RNA, 23 nt, Artificial Sequence
  Chemically synthesized
caucagacccuggcccaauaccu

SEQ ID NO: 86543 - RNA, 23 nt, Artificial Sequence
  Chemically synthesized
ucaucagacccuggcccaauacc

SEQ ID NO: 86544 - RNA, 23 nt, Artificial Sequence
  Chemically synthesized
uucaucagacccuggcccaauac

SEQ ID NO: 86545 - RNA, 23 nt, Artificial Sequence
  Chemically synthesized
uuucaucagacccuggcccaaua

SEQ ID NO: 86546 - RNA, 23 nt, Artificial Sequence
  Chemically synthesized
gcaugucuguauguguguugggg

SEQ ID NO: 86547 - RNA, 23 nt, Artificial Sequence
  Chemically synthesized
ugcaugucuguauguguguuggg

SEQ ID NO: 86548 - RNA, 23 nt, Artificial Sequence
  Chemically synthesized
gugcaugucuguauguguguugg

SEQ ID NO: 86549 - RNA, 23 nt, Artificial Sequence
  Chemically synthesized
ugugcaugucuguauguguguug

SEQ ID NO: 86550 - RNA, 23 nt, Artificial Sequence
  Chemically synthesized
gugugcaugucuguauguguguu

SEQ ID NO: 86551 - RNA, 23 nt, Artificial Sequence
  Chemically synthesized
agcuggcugagaaguucgaccuc

SEQ ID NO: 86552 - RNA, 23 nt, Artificial Sequence
  Chemically synthesized
cagcuggcugagaaguucgaccu

SEQ ID NO: 86553 - RNA, 23 nt, Artificial Sequence
  Chemically synthesized
ccagcuggcugagaaguucgacc

SEQ ID NO: 86554 - RNA, 23 nt, Artificial Sequence
  Chemically synthesized
cccagcuggcugagaaguucgac

SEQ ID NO: 86555 - RNA, 23 nt, Artificial Sequence
  Chemically synthesized
acccagcuggcugagaaguucga

SEQ ID NO: 86556 - RNA, 23 nt, Artificial Sequence
  Chemically synthesized
agguggaggagaaugaccaccag

SEQ ID NO: 86557 - RNA, 23 nt, Artificial Sequence
  Chemically synthesized
gagguggaggagaaugaccacca

SEQ ID NO: 86558 - RNA, 23 nt, Artificial Sequence
  Chemically synthesized
agagguggaggagaaugaccacc

SEQ ID NO: 86559 - RNA, 23 nt, Artificial Sequence
  Chemically synthesized
cuuacacagugugggccaugugg

SEQ ID NO: 86560 - RNA, 23 nt, Artificial Sequence
  Chemically synthesized
ucuuacacagugugggccaugug

SEQ ID NO: 86561 - RNA, 23 nt, Artificial Sequence
  Chemically synthesized
gucuuacacagugugggccaugu

SEQ ID NO: 86562 - RNA, 23 nt, Artificial Sequence
  Chemically synthesized
agucuuacacagugugggccaug

SEQ ID NO: 86563 - RNA, 23 nt, Artificial Sequence
  Chemically synthesized
cagucuuacacagugugggccau

SEQ ID NO: 86564 - RNA, 23 nt, Artificial Sequence
  Chemically synthesized
gguggaggugccugaagucauca

SEQ ID NO: 86565 - RNA, 23 nt, Artificial Sequence
  Chemically synthesized
ggguggaggugccugaagucauc

SEQ ID NO: 86566 - RNA, 23 nt, Artificial Sequence
  Chemically synthesized
gggguggaggugccugaagucau

SEQ ID NO: 86567 - RNA, 23 nt, Artificial Sequence
  Chemically synthesized
ccuuauguuccgcauguacgacu

SEQ ID NO: 86568 - RNA, 23 nt, Artificial Sequence
  Chemically synthesized
uugucuggcauaaaggagacccc

SEQ ID NO: 86569 - RNA, 23 nt, Artificial Sequence
  Chemically synthesized
uuugucuggcauaaaggagaccc

SEQ ID NO: 86570 - RNA, 23 nt, Artificial Sequence
  Chemically synthesized
ccugcagaaaacacucccggagu

SEQ ID NO: 86571 - RNA, 23 nt, Artificial Sequence
  Chemically synthesized
uccugcagaaaacacucccggag

SEQ ID NO: 86572 - RNA, 23 nt, Artificial Sequence
  Chemically synthesized
uuccugcagaaaacacucccgga

SEQ ID NO: 86573 - RNA, 23 nt, Artificial Sequence
  Chemically synthesized
ugugugcaugucuguaugugugu

SEQ ID NO: 86574 - RNA, 23 nt, Artificial Sequence
  Chemically synthesized
gugugugcaugucuguaugugug

SEQ ID NO: 86575 - RNA, 23 nt, Artificial Sequence
  Chemically synthesized
ugugugugcaugucuguaugugu

SEQ ID NO: 86576 - RNA, 23 nt, Artificial Sequence
  Chemically synthesized
aaguacuaugugugugcaugucu

SEQ ID NO: 86577 - RNA, 23 nt, Artificial Sequence
  Chemically synthesized
agugucuagggacuagagugaga

SEQ ID NO: 86578 - RNA, 23 nt, Artificial Sequence
  Chemically synthesized
aguggcuggcugacaucauccga

SEQ ID NO: 86579 - RNA, 23 nt, Artificial Sequence
  Chemically synthesized
gaguggcuggcugacaucauccg

SEQ ID NO: 86580 - RNA, 23 nt, Artificial Sequence
  Chemically synthesized
ugaguggcuggcugacaucaucc

SEQ ID NO: 86581 - RNA, 23 nt, Artificial Sequence
  Chemically synthesized
uugaguggcuggcugacaucauc

SEQ ID NO: 86582 - RNA, 23 nt, Artificial Sequence
  Chemically synthesized
uuugaguggcuggcugacaucau

SEQ ID NO: 86583 - RNA, 23 nt, Artificial Sequence
  Chemically synthesized
uacuggugguucuuccagaccgu

SEQ ID NO: 86584 - RNA, 23 nt, Artificial Sequence
  Chemically synthesized
uuacuggugguucuuccagaccg

SEQ ID NO: 86585 - RNA, 23 nt, Artificial Sequence
  Chemically synthesized
auuacuggugguucuuccagacc

SEQ ID NO: 86586 - RNA, 23 nt, Artificial Sequence
  Chemically synthesized
uauuacuggugguucuuccagac

SEQ ID NO: 86587 - RNA, 23 nt, Artificial Sequence
  Chemically synthesized
guauuacuggugguucuuccaga

SEQ ID NO: 86588 - RNA, 23 nt, Artificial Sequence
  Chemically synthesized
cucucuggcugacaaggauggca

SEQ ID NO: 86589 - RNA, 23 nt, Artificial Sequence
  Chemically synthesized
ucucucuggcugacaaggauggc

SEQ ID NO: 86590 - RNA, 23 nt, Artificial Sequence
  Chemically synthesized
uucucucuggcugacaaggaugg

SEQ ID NO: 86591 - RNA, 23 nt, Artificial Sequence
  Chemically synthesized
guucucucuggcugacaaggaug

SEQ ID NO: 86592 - RNA, 23 nt, Artificial Sequence
  Chemically synthesized
uaugguuccucgcauuccuggag

SEQ ID NO: 86593 - RNA, 23 nt, Artificial Sequence
  Chemically synthesized
cuaugguuccucgcauuccugga

SEQ ID NO: 86594 - RNA, 23 nt, Artificial Sequence
  Chemically synthesized
ucuaugguuccucgcauuccugg

SEQ ID NO: 86595 - RNA, 23 nt, Artificial Sequence
  Chemically synthesized
aggaugugucucagccuggagaa

SEQ ID NO: 86596 - RNA, 23 nt, Artificial Sequence
  Chemically synthesized
ucacuucucccaccauuaugaga

SEQ ID NO: 86597 - RNA, 23 nt, Artificial Sequence
  Chemically synthesized
gggccaccaggaguggcauaagu

SEQ ID NO: 86598 - RNA, 23 nt, Artificial Sequence
  Chemically synthesized
ccaaagcuguaccuugauggacc

SEQ ID NO: 86599 - RNA, 23 nt, Artificial Sequence
  Chemically synthesized
ugaguucaucaggaugcugagau

SEQ ID NO: 86600 - RNA, 23 nt, Artificial Sequence
  Chemically synthesized
augaguucaucaggaugcugaga

SEQ ID NO: 86601 - RNA, 23 nt, Artificial Sequence
  Chemically synthesized
gaugaguucaucaggaugcugag

SEQ ID NO: 86602 - RNA, 23 nt, Artificial Sequence
  Chemically synthesized
gagcugaugagagcagcugugac

SEQ ID NO: 86603 - RNA, 23 nt, Artificial Sequence
  Chemically synthesized
ggagcugaugagagcagcuguga

SEQ ID NO: 86604 - RNA, 23 nt, Artificial Sequence
  Chemically synthesized
auuugugcggcuacgggauggug

SEQ ID NO: 86605 - RNA, 23 nt, Artificial Sequence
  Chemically synthesized
ucccauaccuccuccucuucugg

SEQ ID NO: 86606 - RNA, 23 nt, Artificial Sequence
  Chemically synthesized
cucccauaccuccuccucuucug

SEQ ID NO: 86607 - RNA, 23 nt, Artificial Sequence
  Chemically synthesized
acucccauaccuccuccucuucu

SEQ ID NO: 86608 - RNA, 23 nt, Artificial Sequence
  Chemically synthesized
uacucccauaccuccuccucuuc

SEQ ID NO: 86609 - RNA, 23 nt, Artificial Sequence
  Chemically synthesized
cuacucccauaccuccuccucuu

SEQ ID NO: 86610 - RNA, 23 nt, Artificial Sequence
  Chemically synthesized
cagugucuagggacuagagugag

SEQ ID NO: 86611 - RNA, 23 nt, Artificial Sequence
  Chemically synthesized
gcagugucuagggacuagaguga

SEQ ID NO: 86612 - RNA, 23 nt, Artificial Sequence
  Chemically synthesized
uguuccagguggccauagucagu

SEQ ID NO: 86613 - RNA, 23 nt, Artificial Sequence
  Chemically synthesized
uuguuccagguggccauagucag

SEQ ID NO: 86614 - RNA, 23 nt, Artificial Sequence
  Chemically synthesized
guucuuccagaccguaccaggcc

SEQ ID NO: 86615 - RNA, 23 nt, Artificial Sequence
  Chemically synthesized
gguucuuccagaccguaccaggc

SEQ ID NO: 86616 - RNA, 23 nt, Artificial Sequence
  Chemically synthesized
ugguucuuccagaccguaccagg

SEQ ID NO: 86617 - RNA, 23 nt, Artificial Sequence
  Chemically synthesized
gugguucuuccagaccguaccag

SEQ ID NO: 86618 - RNA, 23 nt, Artificial Sequence
  Chemically synthesized
ggugguucuuccagaccguacca

SEQ ID NO: 86619 - RNA, 23 nt, Artificial Sequence
  Chemically synthesized
ucaucgagaucuccaacaacugc

SEQ ID NO: 86620 - RNA, 23 nt, Artificial Sequence
  Chemically synthesized
uucaucgagaucuccaacaacug

SEQ ID NO: 86621 - RNA, 23 nt, Artificial Sequence
  Chemically synthesized
cuucaucgagaucuccaacaacu

SEQ ID NO: 86622 - RNA, 23 nt, Artificial Sequence
  Chemically synthesized
gagaguuccuggacauccuggug

SEQ ID NO: 86623 - RNA, 23 nt, Artificial Sequence
  Chemically synthesized
cgagaguuccuggacauccuggu

SEQ ID NO: 86624 - RNA, 23 nt, Artificial Sequence
  Chemically synthesized
ccgagaguuccuggacauccugg

SEQ ID NO: 86625 - RNA, 23 nt, Artificial Sequence
  Chemically synthesized
uccgagaguuccuggacauccug

SEQ ID NO: 86626 - RNA, 23 nt, Artificial Sequence
  Chemically synthesized
uuccgagaguuccuggacauccu

SEQ ID NO: 86627 - RNA, 23 nt, Artificial Sequence
  Chemically synthesized
agggcaguggauuuggcuucggg

SEQ ID NO: 86628 - RNA, 23 nt, Artificial Sequence
  Chemically synthesized
gagggcaguggauuuggcuucgg

SEQ ID NO: 86629 - RNA, 23 nt, Artificial Sequence
  Chemically synthesized
ugagggcaguggauuuggcuucg

SEQ ID NO: 86630 - RNA, 23 nt, Artificial Sequence
  Chemically synthesized
uugagggcaguggauuuggcuuc

SEQ ID NO: 86631 - RNA, 23 nt, Artificial Sequence
  Chemically synthesized
uuugagggcaguggauuuggcuu

SEQ ID NO: 86632 - RNA, 23 nt, Artificial Sequence
  Chemically synthesized
cagacccuggcccaauaccuaug

SEQ ID NO: 86633 - RNA, 23 nt, Artificial Sequence
  Chemically synthesized
ucagacccuggcccaauaccuau

SEQ ID NO: 86634 - RNA, 23 nt, Artificial Sequence
  Chemically synthesized
aauuucacccaagguuuuaagca

SEQ ID NO: 86635 - RNA, 23 nt, Artificial Sequence
  Chemically synthesized
gcuggacccauggcaagccauuu

SEQ ID NO: 86636 - RNA, 23 nt, Artificial Sequence
  Chemically synthesized
uggcaaaugccuugcaggaggua

SEQ ID NO: 86637 - RNA, 23 nt, Artificial Sequence
  Chemically synthesized
cuggcaaaugccuugcaggaggu

SEQ ID NO: 86638 - RNA, 23 nt, Artificial Sequence
  Chemically synthesized
gcuggcaaaugccuugcaggagg

SEQ ID NO: 86639 - RNA, 23 nt, Artificial Sequence
  Chemically synthesized
ggcuggcaaaugccuugcaggag

SEQ ID NO: 86640 - RNA, 23 nt, Artificial Sequence
  Chemically synthesized
gggcuggcaaaugccuugcagga

SEQ ID NO: 86641 - RNA, 23 nt, Artificial Sequence
  Chemically synthesized
ugggugaaauuaguugugguguu

SEQ ID NO: 86642 - RNA, 23 nt, Artificial Sequence
  Chemically synthesized
augucaguuccuccuuguccugg

SEQ ID NO: 86643 - RNA, 23 nt, Artificial Sequence
  Chemically synthesized
ugucaguuccuccuuguccugga

SEQ ID NO: 86644 - RNA, 23 nt, Artificial Sequence
  Chemically synthesized
guucuaagaugccagcauccaug

SEQ ID NO: 86645 - RNA, 23 nt, Artificial Sequence
  Chemically synthesized
uucuaagaugccagcauccaugc

SEQ ID NO: 86646 - RNA, 23 nt, Artificial Sequence
  Chemically synthesized
ucuaagaugccagcauccaugcu

SEQ ID NO: 86647 - RNA, 23 nt, Artificial Sequence
  Chemically synthesized
cuaagaugccagcauccaugcuc

SEQ ID NO: 86648 - RNA, 23 nt, Artificial Sequence
  Chemically synthesized
uaagaugccagcauccaugcucc

SEQ ID NO: 86649 - RNA, 23 nt, Artificial Sequence
  Chemically synthesized
acagauguacagcauaguggucc

SEQ ID NO: 86650 - RNA, 23 nt, Artificial Sequence
  Chemically synthesized
uucagugcugagcugucucggcu

SEQ ID NO: 86651 - RNA, 23 nt, Artificial Sequence
  Chemically synthesized
uacagugucauugcuccgggaga

SEQ ID NO: 86652 - RNA, 23 nt, Artificial Sequence
  Chemically synthesized
ccccuacuucucacucuaguccc

SEQ ID NO: 86653 - RNA, 23 nt, Artificial Sequence
  Chemically synthesized
gaaauuaguugugguguuagacu

SEQ ID NO: 86654 - RNA, 23 nt, Artificial Sequence
  Chemically synthesized
aaauuaguugugguguuagacug

SEQ ID NO: 86655 - RNA, 23 nt, Artificial Sequence
  Chemically synthesized
aauuaguugugguguuagacugg

SEQ ID NO: 86656 - RNA, 23 nt, Artificial Sequence
  Chemically synthesized
auuaguugugguguuagacuggg

SEQ ID NO: 86657 - RNA, 23 nt, Artificial Sequence
  Chemically synthesized
uuaguugugguguuagacugggg

SEQ ID NO: 86658 - RNA, 23 nt, Artificial Sequence
  Chemically synthesized
augcucccacugcauccuuacac

SEQ ID NO: 86659 - RNA, 23 nt, Artificial Sequence
  Chemically synthesized
ugcucccacugcauccuuacacu

SEQ ID NO: 86660 - RNA, 23 nt, Artificial Sequence
  Chemically synthesized
gcucccacugcauccuuacacuc

SEQ ID NO: 86661 - RNA, 23 nt, Artificial Sequence
  Chemically synthesized
cucccacugcauccuuacacuca

SEQ ID NO: 86662 - RNA, 23 nt, Artificial Sequence
  Chemically synthesized
ucccacugcauccuuacacucac

SEQ ID NO: 86663 - RNA, 23 nt, Artificial Sequence
  Chemically synthesized
ccacugcauccuuacacucaccg

SEQ ID NO: 86664 - RNA, 23 nt, Artificial Sequence
  Chemically synthesized
cacugcauccuuacacucaccgc

SEQ ID NO: 86665 - RNA, 23 nt, Artificial Sequence
  Chemically synthesized
acugcauccuuacacucaccgcc

SEQ ID NO: 86666 - RNA, 23 nt, Artificial Sequence
  Chemically synthesized
cugcauccuuacacucaccgccc

SEQ ID NO: 86667 - RNA, 23 nt, Artificial Sequence
  Chemically synthesized
ugcauccuuacacucaccgcccc

SEQ ID NO: 86668 - RNA, 23 nt, Artificial Sequence
  Chemically synthesized
agggugguauuucggauuucuuc

SEQ ID NO: 86669 - RNA, 23 nt, Artificial Sequence
  Chemically synthesized
gggugguauuucggauuucuuca

SEQ ID NO: 86670 - RNA, 23 nt, Artificial Sequence
  Chemically synthesized
ggugguauuucggauuucuucaa

SEQ ID NO: 86671 - RNA, 23 nt, Artificial Sequence
  Chemically synthesized
gugguauuucggauuucuucaau

SEQ ID NO: 86672 - RNA, 23 nt, Artificial Sequence
  Chemically synthesized
cgccuucaccacgcugaucucca

SEQ ID NO: 86673 - RNA, 23 nt, Artificial Sequence
  Chemically synthesized
gccuucaccacgcugaucuccac

SEQ ID NO: 86674 - RNA, 23 nt, Artificial Sequence
  Chemically synthesized
ccuucaccacgcugaucuccacc

SEQ ID NO: 86675 - RNA, 23 nt, Artificial Sequence
  Chemically synthesized
cuucaccacgcugaucuccaccu

SEQ ID NO: 86676 - RNA, 23 nt, Artificial Sequence
  Chemically synthesized
uucaccacgcugaucuccaccuu

SEQ ID NO: 86677 - RNA, 23 nt, Artificial Sequence
  Chemically synthesized
gaggugucaacucagucucaaug

SEQ ID NO: 86678 - RNA, 23 nt, Artificial Sequence
  Chemically synthesized
aggugucaacucagucucaaugu

SEQ ID NO: 86679 - RNA, 23 nt, Artificial Sequence
  Chemically synthesized
uucuucaaucuccuucuuggaga

SEQ ID NO: 86680 - RNA, 23 nt, Artificial Sequence
  Chemically synthesized
ucuucaaucuccuucuuggagaa

SEQ ID NO: 86681 - RNA, 23 nt, Artificial Sequence
  Chemically synthesized
ggccugugaauagacuccgguuc

SEQ ID NO: 86682 - RNA, 23 nt, Artificial Sequence
  Chemically synthesized
gccugugaauagacuccgguuca

SEQ ID NO: 86683 - RNA, 23 nt, Artificial Sequence
  Chemically synthesized
ccugugaauagacuccgguucag

SEQ ID NO: 86684 - RNA, 23 nt, Artificial Sequence
  Chemically synthesized
cugugaauagacuccgguucaga

SEQ ID NO: 86685 - RNA, 23 nt, Artificial Sequence
  Chemically synthesized
ugugaauagacuccgguucagaa

SEQ ID NO: 86686 - RNA, 23 nt, Artificial Sequence
  Chemically synthesized
cacgcugaucuccaccuucuucc

SEQ ID NO: 86687 - RNA, 23 nt, Artificial Sequence
  Chemically synthesized
cagcuuuggguaucuggcacauc

SEQ ID NO: 86688 - RNA, 23 nt, Artificial Sequence
  Chemically synthesized
caggucugaaagcacgugauagc

SEQ ID NO: 86689 - RNA, 23 nt, Artificial Sequence
  Chemically synthesized
aggucugaaagcacgugauagcc

SEQ ID NO: 86690 - RNA, 23 nt, Artificial Sequence
  Chemically synthesized
ggucugaaagcacgugauagcca

SEQ ID NO: 86691 - RNA, 23 nt, Artificial Sequence
  Chemically synthesized
gucugaaagcacgugauagccaa

SEQ ID NO: 86692 - RNA, 23 nt, Artificial Sequence
  Chemically synthesized
ucugaaagcacgugauagccaaa

SEQ ID NO: 86693 - RNA, 23 nt, Artificial Sequence
  Chemically synthesized
acacugacaccucaaacuuaugc

SEQ ID NO: 86694 - RNA, 23 nt, Artificial Sequence
  Chemically synthesized
caaauccacugcccucaaaauag

SEQ ID NO: 86695 - RNA, 23 nt, Artificial Sequence
  Chemically synthesized
aaauccacugcccucaaaauagu

SEQ ID NO: 86696 - RNA, 23 nt, Artificial Sequence
  Chemically synthesized
aauccacugcccucaaaauaguc

SEQ ID NO: 86697 - RNA, 23 nt, Artificial Sequence
  Chemically synthesized
aggcugaggcagccagaaauagg

SEQ ID NO: 86698 - RNA, 23 nt, Artificial Sequence
  Chemically synthesized
ggcugaggcagccagaaauagga

SEQ ID NO: 86699 - RNA, 23 nt, Artificial Sequence
  Chemically synthesized
gcugaggcagccagaaauaggaa

SEQ ID NO: 86700 - RNA, 23 nt, Artificial Sequence
  Chemically synthesized
cugaggcagccagaaauaggaag

SEQ ID NO: 86701 - RNA, 23 nt, Artificial Sequence
  Chemically synthesized
ugaggcagccagaaauaggaaga

SEQ ID NO: 86702 - RNA, 23 nt, Artificial Sequence
  Chemically synthesized
agccgcacaaauuguucaaggac

SEQ ID NO: 86703 - RNA, 23 nt, Artificial Sequence
  Chemically synthesized
aagguacagcuuuggguaucugg

SEQ ID NO: 86704 - RNA, 23 nt, Artificial Sequence
  Chemically synthesized
agguacagcuuuggguaucuggc

SEQ ID NO: 86705 - RNA, 23 nt, Artificial Sequence
  Chemically synthesized
gguacagcuuuggguaucuggca

SEQ ID NO: 86706 - RNA, 23 nt, Artificial Sequence
  Chemically synthesized
guacagcuuuggguaucuggcac

SEQ ID NO: 86707 - RNA, 23 nt, Artificial Sequence
  Chemically synthesized
uacagcuuuggguaucuggcaca

SEQ ID NO: 86708 - RNA, 23 nt, Artificial Sequence
  Chemically synthesized
ugucugugaugcccgugugaugu

SEQ ID NO: 86709 - RNA, 23 nt, Artificial Sequence
  Chemically synthesized
gucugugaugcccgugugaugug

SEQ ID NO: 86710 - RNA, 23 nt, Artificial Sequence
  Chemically synthesized
ucugugaugcccgugugaugugc

SEQ ID NO: 86711 - RNA, 23 nt, Artificial Sequence
  Chemically synthesized
cugugaugcccgugugaugugcg

SEQ ID NO: 86712 - RNA, 23 nt, Artificial Sequence
  Chemically synthesized
ugugaugcccgugugaugugcgg

SEQ ID NO: 86713 - RNA, 23 nt, Artificial Sequence
  Chemically synthesized
cuucuuggagaacagcccauucc

SEQ ID NO: 86714 - RNA, 23 nt, Artificial Sequence
  Chemically synthesized
uucuuggagaacagcccauuccu

SEQ ID NO: 86715 - RNA, 23 nt, Artificial Sequence
  Chemically synthesized
ucuuggagaacagcccauuccug

SEQ ID NO: 86716 - RNA, 23 nt, Artificial Sequence
  Chemically synthesized
cuuggagaacagcccauuccugg

SEQ ID NO: 86717 - RNA, 23 nt, Artificial Sequence
  Chemically synthesized
uuggagaacagcccauuccuggu

SEQ ID NO: 86718 - RNA, 23 nt, Artificial Sequence
  Chemically synthesized
ugaaauuaguugugguguuagac

SEQ ID NO: 86719 - RNA, 23 nt, Artificial Sequence
  Chemically synthesized
aagguugggaggugggaaaucag

SEQ ID NO: 86720 - RNA, 23 nt, Artificial Sequence
  Chemically synthesized
agguugggaggugggaaaucaga

SEQ ID NO: 86721 - RNA, 23 nt, Artificial Sequence
  Chemically synthesized
gguugggaggugggaaaucagag

SEQ ID NO: 86722 - RNA, 23 nt, Artificial Sequence
  Chemically synthesized
guugggaggugggaaaucagaga

SEQ ID NO: 86723 - RNA, 23 nt, Artificial Sequence
  Chemically synthesized
uugggaggugggaaaucagagaa

SEQ ID NO: 86724 - RNA, 23 nt, Artificial Sequence
  Chemically synthesized
uuuccacauucuuggucaugcca

SEQ ID NO: 86725 - RNA, 23 nt, Artificial Sequence
  Chemically synthesized
uuccacauucuuggucaugccag

SEQ ID NO: 86726 - RNA, 23 nt, Artificial Sequence
  Chemically synthesized
uccacauucuuggucaugccagg

SEQ ID NO: 86727 - RNA, 23 nt, Artificial Sequence
  Chemically synthesized
guggucauucuccuccaccucuc

SEQ ID NO: 86728 - RNA, 23 nt, Artificial Sequence
  Chemically synthesized
uggucauucuccuccaccucucg

SEQ ID NO: 86729 - RNA, 23 nt, Artificial Sequence
  Chemically synthesized
ggucauucuccuccaccucucgg

SEQ ID NO: 86730 - RNA, 23 nt, Artificial Sequence
  Chemically synthesized
gucauucuccuccaccucucgga

SEQ ID NO: 86731 - RNA, 23 nt, Artificial Sequence
  Chemically synthesized
ucauucuccuccaccucucggau

SEQ ID NO: 86732 - RNA, 23 nt, Artificial Sequence
  Chemically synthesized
cccgugucacagcugcucucauc

SEQ ID NO: 86733 - RNA, 23 nt, Artificial Sequence
  Chemically synthesized
ccgugucacagcugcucucauca

SEQ ID NO: 86734 - RNA, 23 nt, Artificial Sequence
  Chemically synthesized
cgugucacagcugcucucaucag

SEQ ID NO: 86735 - RNA, 23 nt, Artificial Sequence
  Chemically synthesized
gugucacagcugcucucaucagc

SEQ ID NO: 86736 - RNA, 23 nt, Artificial Sequence
  Chemically synthesized
ugucacagcugcucucaucagcu

SEQ ID NO: 86737 - RNA, 23 nt, Artificial Sequence
  Chemically synthesized
gggcaaagcuaccauggaugaug

SEQ ID NO: 86738 - RNA, 23 nt, Artificial Sequence
  Chemically synthesized
gggcuggaaugacguuaccuucu

SEQ ID NO: 86739 - RNA, 23 nt, Artificial Sequence
  Chemically synthesized
ggcuggaaugacguuaccuucuu

SEQ ID NO: 86740 - RNA, 23 nt, Artificial Sequence
  Chemically synthesized
acucagucucaaugucgcugcgg

SEQ ID NO: 86741 - RNA, 23 nt, Artificial Sequence
  Chemically synthesized
cucagucucaaugucgcugcggg

SEQ ID NO: 86742 - RNA, 23 nt, Artificial Sequence
  Chemically synthesized
ucagucucaaugucgcugcggga

SEQ ID NO: 86743 - RNA, 23 nt, Artificial Sequence
  Chemically synthesized
ccccuuugacacagagcugcgug

SEQ ID NO: 86744 - RNA, 23 nt, Artificial Sequence
  Chemically synthesized
cccuuugacacagagcugcguga

SEQ ID NO: 86745 - RNA, 23 nt, Artificial Sequence
  Chemically synthesized
ccuuugacacagagcugcgugaa

SEQ ID NO: 86746 - RNA, 23 nt, Artificial Sequence
  Chemically synthesized
cuuugacacagagcugcgugaag

SEQ ID NO: 86747 - RNA, 23 nt, Artificial Sequence
  Chemically synthesized
uuugacacagagcugcgugaagc

SEQ ID NO: 86748 - RNA, 23 nt, Artificial Sequence
  Chemically synthesized
ugccaucuaccacacggaucugc

SEQ ID NO: 86749 - RNA, 23 nt, Artificial Sequence
  Chemically synthesized
gccaucuaccacacggaucugcc

SEQ ID NO: 86750 - RNA, 23 nt, Artificial Sequence
  Chemically synthesized
ccaucuaccacacggaucugccc

SEQ ID NO: 86751 - RNA, 23 nt, Artificial Sequence
  Chemically synthesized
caucuaccacacggaucugcccg

SEQ ID NO: 86752 - RNA, 23 nt, Artificial Sequence
  Chemically synthesized
aucuaccacacggaucugcccgg

SEQ ID NO: 86753 - RNA, 23 nt, Artificial Sequence
  Chemically synthesized
aaucuccuucuuggagaacagcc

SEQ ID NO: 86754 - RNA, 23 nt, Artificial Sequence
  Chemically synthesized
aucuccuucuuggagaacagccc

SEQ ID NO: 86755 - RNA, 23 nt, Artificial Sequence
  Chemically synthesized
ucuccuucuuggagaacagccca

SEQ ID NO: 86756 - RNA, 23 nt, Artificial Sequence
  Chemically synthesized
cuccuucuuggagaacagcccau

SEQ ID NO: 86757 - RNA, 23 nt, Artificial Sequence
  Chemically synthesized
uccuucuuggagaacagcccauu

SEQ ID NO: 86758 - RNA, 23 nt, Artificial Sequence
  Chemically synthesized
uccccuacuucucacucuagucc

SEQ ID NO: 86759 - RNA, 23 nt, Artificial Sequence
  Chemically synthesized
auuucuccaggcugagacacauc

SEQ ID NO: 86760 - RNA, 23 nt, Artificial Sequence
  Chemically synthesized
uuucuccaggcugagacacaucc

SEQ ID NO: 86761 - RNA, 23 nt, Artificial Sequence
  Chemically synthesized
guuguuguaccacccaucaaauc

SEQ ID NO: 86762 - RNA, 23 nt, Artificial Sequence
  Chemically synthesized
ugaauagacuccgguucagaacc

SEQ ID NO: 86763 - RNA, 23 nt, Artificial Sequence
  Chemically synthesized
gaauagacuccgguucagaaccu

SEQ ID NO: 86764 - RNA, 23 nt, Artificial Sequence
  Chemically synthesized
aauagacuccgguucagaaccuu

SEQ ID NO: 86765 - RNA, 23 nt, Artificial Sequence
  Chemically synthesized
auagacuccgguucagaaccuuc

SEQ ID NO: 86766 - RNA, 23 nt, Artificial Sequence
  Chemically synthesized
gcccauuccugguguucucaaac

SEQ ID NO: 86767 - RNA, 23 nt, Artificial Sequence
  Chemically synthesized
gagguaugggaguagggaggguu

SEQ ID NO: 86768 - RNA, 23 nt, Artificial Sequence
  Chemically synthesized
agguaugggaguagggaggguuc

SEQ ID NO: 86769 - RNA, 23 nt, Artificial Sequence
  Chemically synthesized
gguaugggaguagggaggguucu

SEQ ID NO: 86770 - RNA, 23 nt, Artificial Sequence
  Chemically synthesized
guaugggaguagggaggguucua

SEQ ID NO: 86771 - RNA, 23 nt, Artificial Sequence
  Chemically synthesized
uaugggaguagggaggguucuaa

SEQ ID NO: 86772 - RNA, 23 nt, Artificial Sequence
  Chemically synthesized
ggguucuaagaugccagcaucca

SEQ ID NO: 86773 - RNA, 23 nt, Artificial Sequence
  Chemically synthesized
gguucuaagaugccagcauccau

SEQ ID NO: 86774 - RNA, 23 nt, Artificial Sequence
  Chemically synthesized
agguuguuguaccacccaucaaa

SEQ ID NO: 86775 - RNA, 23 nt, Artificial Sequence
  Chemically synthesized
gguuguuguaccacccaucaaau

SEQ ID NO: 86776 - RNA, 23 nt, Artificial Sequence
  Chemically synthesized
uggguaucuggcacaucugucac

SEQ ID NO: 86777 - RNA, 23 nt, Artificial Sequence
  Chemically synthesized
cagcuggaucagggcaaagcuac

SEQ ID NO: 86778 - RNA, 23 nt, Artificial Sequence
  Chemically synthesized
agcuggaucagggcaaagcuacc

SEQ ID NO: 86779 - RNA, 23 nt, Artificial Sequence
  Chemically synthesized
ggaacauaaggcgagacuuuucc

SEQ ID NO: 86780 - RNA, 23 nt, Artificial Sequence
  Chemically synthesized
uggccuugccauuccaaagcuuc

SEQ ID NO: 86781 - RNA, 23 nt, Artificial Sequence
  Chemically synthesized
uuguacucaaagcccuggggccg

SEQ ID NO: 86782 - RNA, 23 nt, Artificial Sequence
  Chemically synthesized
guccagaaauggccgguauccug

SEQ ID NO: 86783 - RNA, 23 nt, Artificial Sequence
  Chemically synthesized
uccagaaauggccgguauccugu

SEQ ID NO: 86784 - RNA, 23 nt, Artificial Sequence
  Chemically synthesized
ccagaaauggccgguauccugua

SEQ ID NO: 86785 - RNA, 23 nt, Artificial Sequence
  Chemically synthesized
auaguacuugucaggucagcuug

SEQ ID NO: 86786 - RNA, 23 nt, Artificial Sequence
  Chemically synthesized
uaguacuugucaggucagcuugu

SEQ ID NO: 86787 - RNA, 23 nt, Artificial Sequence
  Chemically synthesized
gugaauagacuccgguucagaac

SEQ ID NO: 86788 - RNA, 23 nt, Artificial Sequence
  Chemically synthesized
uccucaggagagccuuucaugaa

SEQ ID NO: 86789 - RNA, 23 nt, Artificial Sequence
  Chemically synthesized
ccucaggagagccuuucaugaag

SEQ ID NO: 86790 - RNA, 23 nt, Artificial Sequence
  Chemically synthesized
cucaggagagccuuucaugaaga

SEQ ID NO: 86791 - RNA, 23 nt, Artificial Sequence
  Chemically synthesized
ucaggagagccuuucaugaagac

SEQ ID NO: 86792 - RNA, 23 nt, Artificial Sequence
  Chemically synthesized
ggucuccuuuaugccagacaaag

SEQ ID NO: 86793 - RNA, 23 nt, Artificial Sequence
  Chemically synthesized
gucuccuuuaugccagacaaaga

SEQ ID NO: 86794 - RNA, 23 nt, Artificial Sequence
  Chemically synthesized
guggucugugcgggaaaacuuca

SEQ ID NO: 86795 - RNA, 23 nt, Artificial Sequence
  Chemically synthesized
uggucugugcgggaaaacuucag

SEQ ID NO: 86796 - RNA, 23 nt, Artificial Sequence
  Chemically synthesized
cagguugugguagcggaaccaga

SEQ ID NO: 86797 - RNA, 23 nt, Artificial Sequence
  Chemically synthesized
agguugugguagcggaaccagag

SEQ ID NO: 86798 - RNA, 23 nt, Artificial Sequence
  Chemically synthesized
gguugugguagcggaaccagagc

SEQ ID NO: 86799 - RNA, 23 nt, Artificial Sequence
  Chemically synthesized
guugugguagcggaaccagagca

SEQ ID NO: 86800 - RNA, 23 nt, Artificial Sequence
  Chemically synthesized
uugugguagcggaaccagagcag

SEQ ID NO: 86801 - RNA, 23 nt, Artificial Sequence
  Chemically synthesized
uaguugugguguuagacuggggu

SEQ ID NO: 86802 - RNA, 23 nt, Artificial Sequence
  Chemically synthesized
uccgguucagaaccuucuggaag

SEQ ID NO: 86803 - RNA, 23 nt, Artificial Sequence
  Chemically synthesized
aaagaggcaagagaggacgcuga

SEQ ID NO: 86804 - RNA, 23 nt, Artificial Sequence
  Chemically synthesized
accaucccguagccgcacaaauu

SEQ ID NO: 86805 - RNA, 23 nt, Artificial Sequence
  Chemically synthesized
ccaucccguagccgcacaaauug

SEQ ID NO: 86806 - RNA, 23 nt, Artificial Sequence
  Chemically synthesized
caucccguagccgcacaaauugu

SEQ ID NO: 86807 - RNA, 23 nt, Artificial Sequence
  Chemically synthesized
aucccguagccgcacaaauuguu

SEQ ID NO: 86808 - RNA, 23 nt, Artificial Sequence
  Chemically synthesized
gcuuaaaaccuugggugaaauua

SEQ ID NO: 86809 - RNA, 23 nt, Artificial Sequence
  Chemically synthesized
gggugaaauuaguugugguguua

SEQ ID NO: 86810 - RNA, 23 nt, Artificial Sequence
  Chemically synthesized
ggugaaauuaguugugguguuag

SEQ ID NO: 86811 - RNA, 23 nt, Artificial Sequence
  Chemically synthesized
gugaaauuaguugugguguuaga

SEQ ID NO: 86812 - RNA, 23 nt, Artificial Sequence
  Chemically synthesized
ucagggcaaagcuaccauggaug

SEQ ID NO: 86813 - RNA, 23 nt, Artificial Sequence
  Chemically synthesized
ggcguaguaguaggcccucucca

SEQ ID NO: 86814 - RNA, 23 nt, Artificial Sequence
  Chemically synthesized
gcguaguaguaggcccucuccag

SEQ ID NO: 86815 - RNA, 23 nt, Artificial Sequence
  Chemically synthesized
cguaguaguaggcccucuccagg

SEQ ID NO: 86816 - RNA, 23 nt, Artificial Sequence
  Chemically synthesized
guaguaguaggcccucuccagga

SEQ ID NO: 86817 - RNA, 23 nt, Artificial Sequence
  Chemically synthesized
uaguaguaggcccucuccaggaa

SEQ ID NO: 86818 - RNA, 23 nt, Artificial Sequence
  Chemically synthesized
ucaccaggucugaaagcacguga

SEQ ID NO: 86819 - RNA, 23 nt, Artificial Sequence
  Chemically synthesized
cacauaguacuugucaggucagc

SEQ ID NO: 86820 - RNA, 23 nt, Artificial Sequence
  Chemically synthesized
acauaguacuugucaggucagcu

SEQ ID NO: 86821 - RNA, 23 nt, Artificial Sequence
  Chemically synthesized
cauaguacuugucaggucagcuu

SEQ ID NO: 86822 - RNA, 23 nt, Artificial Sequence
  Chemically synthesized
uagaugauugcugggaccaggaa

SEQ ID NO: 86823 - RNA, 23 nt, Artificial Sequence
  Chemically synthesized
aggcaaugaggcgauggaagucc

SEQ ID NO: 86824 - RNA, 23 nt, Artificial Sequence
  Chemically synthesized
cagcauccugaugaacucauccu

SEQ ID NO: 86825 - RNA, 23 nt, Artificial Sequence
  Chemically synthesized
agcauccugaugaacucauccuu

SEQ ID NO: 86826 - RNA, 23 nt, Artificial Sequence
  Chemically synthesized
gcauccugaugaacucauccuug

SEQ ID NO: 86827 - RNA, 23 nt, Artificial Sequence
  Chemically synthesized
ugucagccagagagaacauggac

SEQ ID NO: 86828 - RNA, 23 nt, Artificial Sequence
  Chemically synthesized
gucagccagagagaacauggacu

SEQ ID NO: 86829 - RNA, 23 nt, Artificial Sequence
  Chemically synthesized
ucagccagagagaacauggacuc

SEQ ID NO: 86830 - RNA, 23 nt, Artificial Sequence
  Chemically synthesized
ggggaucuugagcagcagagugc

SEQ ID NO: 86831 - RNA, 23 nt, Artificial Sequence
  Chemically synthesized
gggaucuugagcagcagagugcg

SEQ ID NO: 86832 - RNA, 23 nt, Artificial Sequence
  Chemically synthesized
ggaucuugagcagcagagugcgg

SEQ ID NO: 86833 - RNA, 23 nt, Artificial Sequence
  Chemically synthesized
gaucuugagcagcagagugcggc

SEQ ID NO: 86834 - RNA, 23 nt, Artificial Sequence
  Chemically synthesized
aucuugagcagcagagugcggcg

SEQ ID NO: 86835 - RNA, 23 nt, Artificial Sequence
  Chemically synthesized
cacguccugcagggugguauuuc

SEQ ID NO: 86836 - RNA, 23 nt, Artificial Sequence
  Chemically synthesized
acguccugcagggugguauuucg

SEQ ID NO: 86837 - RNA, 23 nt, Artificial Sequence
  Chemically synthesized
cguccugcagggugguauuucgg

SEQ ID NO: 86838 - RNA, 23 nt, Artificial Sequence
  Chemically synthesized
guccugcagggugguauuucgga

SEQ ID NO: 86839 - RNA, 23 nt, Artificial Sequence
  Chemically synthesized
uccugcagggugguauuucggau

SEQ ID NO: 86840 - RNA, 23 nt, Artificial Sequence
  Chemically synthesized
uguucugguagguggcgaugacc

SEQ ID NO: 86841 - RNA, 23 nt, Artificial Sequence
  Chemically synthesized
guucugguagguggcgaugaccc

SEQ ID NO: 86842 - RNA, 23 nt, Artificial Sequence
  Chemically synthesized
uucugguagguggcgaugacccu

SEQ ID NO: 86843 - RNA, 23 nt, Artificial Sequence
  Chemically synthesized
gcugaggagcauugcauacauag

SEQ ID NO: 86844 - RNA, 23 nt, Artificial Sequence
  Chemically synthesized
cugaggagcauugcauacauagg

SEQ ID NO: 86845 - RNA, 23 nt, Artificial Sequence
  Chemically synthesized
cugaugaaagaacgugcuuaaaa

SEQ ID NO: 86846 - RNA, 23 nt, Artificial Sequence
  Chemically synthesized
ugaugaaagaacgugcuuaaaac

SEQ ID NO: 86847 - RNA, 23 nt, Artificial Sequence
  Chemically synthesized
ggaguugaagaagggcucaaagg

SEQ ID NO: 86848 - RNA, 23 nt, Artificial Sequence
  Chemically synthesized
agugccgcucacagauguacagc

SEQ ID NO: 86849 - RNA, 23 nt, Artificial Sequence
  Chemically synthesized
gugccgcucacagauguacagca

SEQ ID NO: 86850 - RNA, 23 nt, Artificial Sequence
  Chemically synthesized
ugccgcucacagauguacagcau

SEQ ID NO: 86851 - RNA, 23 nt, Artificial Sequence
  Chemically synthesized
gugauguagaugugcacagacac

SEQ ID NO: 86852 - RNA, 23 nt, Artificial Sequence
  Chemically synthesized
ugauguagaugugcacagacacc

SEQ ID NO: 86853 - RNA, 23 nt, Artificial Sequence
  Chemically synthesized
agacuuuuccucaggagagccuu

SEQ ID NO: 86854 - RNA, 23 nt, Artificial Sequence
  Chemically synthesized
gacuuuuccucaggagagccuuu

SEQ ID NO: 86855 - RNA, 23 nt, Artificial Sequence
  Chemically synthesized
aaggacgauggugcugaacagag

SEQ ID NO: 86856 - RNA, 23 nt, Artificial Sequence
  Chemically synthesized
aggacgauggugcugaacagagg

SEQ ID NO: 86857 - RNA, 23 nt, Artificial Sequence
  Chemically synthesized
ggacgauggugcugaacagaggu

SEQ ID NO: 86858 - RNA, 23 nt, Artificial Sequence
  Chemically synthesized
cagguggucugugcgggaaaacu

SEQ ID NO: 86859 - RNA, 23 nt, Artificial Sequence
  Chemically synthesized
agguggucugugcgggaaaacuu

SEQ ID NO: 86860 - RNA, 23 nt, Artificial Sequence
  Chemically synthesized
gguggucugugcgggaaaacuuc

SEQ ID NO: 86861 - RNA, 23 nt, Artificial Sequence
  Chemically synthesized
gcauccacaucuucagcacuuug

SEQ ID NO: 86862 - RNA, 23 nt, Artificial Sequence
  Chemically synthesized
cauccacaucuucagcacuuugu

SEQ ID NO: 86863 - RNA, 23 nt, Artificial Sequence
  Chemically synthesized
auccacaucuucagcacuuugua

SEQ ID NO: 86864 - RNA, 23 nt, Artificial Sequence
  Chemically synthesized
ucuucagcacuuuguaggcuugg

SEQ ID NO: 86865 - RNA, 23 nt, Artificial Sequence
  Chemically synthesized
cccacugcauccuuacacucacc

SEQ ID NO: 86866 - RNA, 23 nt, Artificial Sequence
  Chemically synthesized
gacaugcacacacauaguacuug

SEQ ID NO: 86867 - RNA, 23 nt, Artificial Sequence
  Chemically synthesized
acaugcacacacauaguacuugu

SEQ ID NO: 86868 - RNA, 23 nt, Artificial Sequence
  Chemically synthesized
caugcacacacauaguacuuguc

SEQ ID NO: 86869 - RNA, 23 nt, Artificial Sequence
  Chemically synthesized
augcacacacauaguacuuguca

SEQ ID NO: 86870 - RNA, 23 nt, Artificial Sequence
  Chemically synthesized
ugcacacacauaguacuugucag

SEQ ID NO: 86871 - RNA, 23 nt, Artificial Sequence
  Chemically synthesized
ccccucccacuaacacugacacc

SEQ ID NO: 86872 - RNA, 23 nt, Artificial Sequence
  Chemically synthesized
cccucccacuaacacugacaccu

SEQ ID NO: 86873 - RNA, 23 nt, Artificial Sequence
  Chemically synthesized
ccucccacuaacacugacaccuc

SEQ ID NO: 86874 - RNA, 23 nt, Artificial Sequence
  Chemically synthesized
cauacaugauggccaggaucagg

SEQ ID NO: 86875 - RNA, 23 nt, Artificial Sequence
  Chemically synthesized
auacaugauggccaggaucagga

SEQ ID NO: 86876 - RNA, 23 nt, Artificial Sequence
  Chemically synthesized
uacaugauggccaggaucaggag

SEQ ID NO: 86877 - RNA, 23 nt, Artificial Sequence
  Chemically synthesized
acaugauggccaggaucaggagc

SEQ ID NO: 86878 - RNA, 23 nt, Artificial Sequence
  Chemically synthesized
caugauggccaggaucaggagca

SEQ ID NO: 86879 - RNA, 23 nt, Artificial Sequence
  Chemically synthesized
augauggccaggaucaggagcag

SEQ ID NO: 86880 - RNA, 23 nt, Artificial Sequence
  Chemically synthesized
cgccucagugaacagcaagggcu

SEQ ID NO: 86881 - RNA, 23 nt, Artificial Sequence
  Chemically synthesized
gccucagugaacagcaagggcug

SEQ ID NO: 86882 - RNA, 23 nt, Artificial Sequence
  Chemically synthesized
ccucagugaacagcaagggcugg

SEQ ID NO: 86883 - RNA, 23 nt, Artificial Sequence
  Chemically synthesized
cucagugaacagcaagggcugga

SEQ ID NO: 86884 - RNA, 23 nt, Artificial Sequence
  Chemically synthesized
ucagugaacagcaagggcuggaa

SEQ ID NO: 86885 - RNA, 23 nt, Artificial Sequence
  Chemically synthesized
cggaacauaaggcgagacuuuuc

SEQ ID NO: 86886 - RNA, 23 nt, Artificial Sequence
  Chemically synthesized
acagguagccauugccauccuug

SEQ ID NO: 86887 - RNA, 23 nt, Artificial Sequence
  Chemically synthesized
cagguagccauugccauccuugu

SEQ ID NO: 86888 - RNA, 23 nt, Artificial Sequence
  Chemically synthesized
agguagccauugccauccuuguc

SEQ ID NO: 86889 - RNA, 23 nt, Artificial Sequence
  Chemically synthesized
gguagccauugccauccuuguca

SEQ ID NO: 86890 - RNA, 23 nt, Artificial Sequence
  Chemically synthesized
guagccauugccauccuugucag

SEQ ID NO: 86891 - RNA, 23 nt, Artificial Sequence
  Chemically synthesized
ggagaaaaggugccugaaaaagg

SEQ ID NO: 86892 - RNA, 23 nt, Artificial Sequence
  Chemically synthesized
gagaaaaggugccugaaaaaggu

SEQ ID NO: 86893 - RNA, 23 nt, Artificial Sequence
  Chemically synthesized
agaaaaggugccugaaaaagguc

SEQ ID NO: 86894 - RNA, 23 nt, Artificial Sequence
  Chemically synthesized
gaaaaggugccugaaaaaggucu

SEQ ID NO: 86895 - RNA, 23 nt, Artificial Sequence
  Chemically synthesized
aaaaggugccugaaaaaggucuc

SEQ ID NO: 86896 - RNA, 23 nt, Artificial Sequence
  Chemically synthesized
ucucaaaccaguagcggucacca

SEQ ID NO: 86897 - RNA, 23 nt, Artificial Sequence
  Chemically synthesized
agccucuaccuccugcaaggcau

SEQ ID NO: 86898 - RNA, 23 nt, Artificial Sequence
  Chemically synthesized
gccucuaccuccugcaaggcauu

SEQ ID NO: 86899 - RNA, 23 nt, Artificial Sequence
  Chemically synthesized
ccucuaccuccugcaaggcauuu

SEQ ID NO: 86900 - RNA, 23 nt, Artificial Sequence
  Chemically synthesized
cucuaccuccugcaaggcauuug

SEQ ID NO: 86901 - RNA, 23 nt, Artificial Sequence
  Chemically synthesized
ucuaccuccugcaaggcauuugc

SEQ ID NO: 86902 - RNA, 23 nt, Artificial Sequence
  Chemically synthesized
ugacuauggccaccuggaacaag

SEQ ID NO: 86903 - RNA, 23 nt, Artificial Sequence
  Chemically synthesized
gacuauggccaccuggaacaagg

SEQ ID NO: 86904 - RNA, 23 nt, Artificial Sequence
  Chemically synthesized
acuauggccaccuggaacaaggu

SEQ ID NO: 86905 - RNA, 23 nt, Artificial Sequence
  Chemically synthesized
cuauggccaccuggaacaagguu

SEQ ID NO: 86906 - RNA, 23 nt, Artificial Sequence
  Chemically synthesized
uauggccaccuggaacaagguug

SEQ ID NO: 86907 - RNA, 23 nt, Artificial Sequence
  Chemically synthesized
auaggaagaacagaggugaggug

SEQ ID NO: 86908 - RNA, 23 nt, Artificial Sequence
  Chemically synthesized
cuccuccaccucucggaugaugu

SEQ ID NO: 86909 - RNA, 23 nt, Artificial Sequence
  Chemically synthesized
uccuccaccucucggaugauguc

SEQ ID NO: 86910 - RNA, 23 nt, Artificial Sequence
  Chemically synthesized
ccuccaccucucggaugauguca

SEQ ID NO: 86911 - RNA, 23 nt, Artificial Sequence
  Chemically synthesized
cuccaccucucggaugaugucag

SEQ ID NO: 86912 - RNA, 23 nt, Artificial Sequence
  Chemically synthesized
uccaccucucggaugaugucagc

SEQ ID NO: 86913 - RNA, 23 nt, Artificial Sequence
  Chemically synthesized
caccucucggaugaugucagcca

SEQ ID NO: 86914 - RNA, 23 nt, Artificial Sequence
  Chemically synthesized
accucucggaugaugucagccag

SEQ ID NO: 86915 - RNA, 23 nt, Artificial Sequence
  Chemically synthesized
ccucucggaugaugucagccagc

SEQ ID NO: 86916 - RNA, 23 nt, Artificial Sequence
  Chemically synthesized
cucucggaugaugucagccagcc

SEQ ID NO: 86917 - RNA, 23 nt, Artificial Sequence
  Chemically synthesized
ucucggaugaugucagccagcca

SEQ ID NO: 86918 - RNA, 23 nt, Artificial Sequence
  Chemically synthesized
acagcuuuggguaucuggcacau

SEQ ID NO: 86919 - RNA, 23 nt, Artificial Sequence
  Chemically synthesized
ucagacccaucaucauggaagag

SEQ ID NO: 86920 - RNA, 23 nt, Artificial Sequence
  Chemically synthesized
cagacccaucaucauggaagagg

SEQ ID NO: 86921 - RNA, 23 nt, Artificial Sequence
  Chemically synthesized
uagccauugccauccuugucagc

SEQ ID NO: 86922 - RNA, 23 nt, Artificial Sequence
  Chemically synthesized
ccaaauccacugcccucaaaaua

SEQ ID NO: 86923 - RNA, 23 nt, Artificial Sequence
  Chemically synthesized
gcacacacauaguacuugucagg

SEQ ID NO: 86924 - RNA, 23 nt, Artificial Sequence
  Chemically synthesized
cacacacauaguacuugucaggu

SEQ ID NO: 86925 - RNA, 23 nt, Artificial Sequence
  Chemically synthesized
acacacauaguacuugucagguc

SEQ ID NO: 86926 - RNA, 23 nt, Artificial Sequence
  Chemically synthesized
cacacauaguacuugucagguca

SEQ ID NO: 86927 - RNA, 23 nt, Artificial Sequence
  Chemically synthesized
acacauaguacuugucaggucag

SEQ ID NO: 86928 - RNA, 23 nt, Artificial Sequence
  Chemically synthesized
ccacauucuuggucaugccaggg

SEQ ID NO: 86929 - RNA, 23 nt, Artificial Sequence
  Chemically synthesized
cacauucuuggucaugccagggg

SEQ ID NO: 86930 - RNA, 23 nt, Artificial Sequence
  Chemically synthesized
acauucuuggucaugccaggggg

SEQ ID NO: 86931 - RNA, 23 nt, Artificial Sequence
  Chemically synthesized
cauucuuggucaugccagggggg

SEQ ID NO: 86932 - RNA, 23 nt, Artificial Sequence
  Chemically synthesized
auucuuggucaugccaggggggc

SEQ ID NO: 86933 - RNA, 23 nt, Artificial Sequence
  Chemically synthesized
uggaagaaccaccaguaauacuu

SEQ ID NO: 86934 - RNA, 23 nt, Artificial Sequence
  Chemically synthesized
ggaagaaccaccaguaauacuuc

SEQ ID NO: 86935 - RNA, 23 nt, Artificial Sequence
  Chemically synthesized
ggugucugugaugcccgugugau

SEQ ID NO: 86936 - RNA, 23 nt, Artificial Sequence
  Chemically synthesized
gugucugugaugcccgugugaug

SEQ ID NO: 86937 - RNA, 23 nt, Artificial Sequence
  Chemically synthesized
ucucugaggugucaacucagucu

SEQ ID NO: 86938 - RNA, 23 nt, Artificial Sequence
  Chemically synthesized
cucugaggugucaacucagucuc

SEQ ID NO: 86939 - RNA, 23 nt, Artificial Sequence
  Chemically synthesized
ucugaggugucaacucagucuca

SEQ ID NO: 86940 - RNA, 23 nt, Artificial Sequence
  Chemically synthesized
cugaggugucaacucagucucaa

SEQ ID NO: 86941 - RNA, 23 nt, Artificial Sequence
  Chemically synthesized
ugaggugucaacucagucucaau

SEQ ID NO: 86942 - RNA, 23 nt, Artificial Sequence
  Chemically synthesized
cgggaugcgaauguugaggaacu

SEQ ID NO: 86943 - RNA, 23 nt, Artificial Sequence
  Chemically synthesized
gggaugcgaauguugaggaacuc

SEQ ID NO: 86944 - RNA, 23 nt, Artificial Sequence
  Chemically synthesized
ggaugcgaauguugaggaacucg

SEQ ID NO: 86945 - RNA, 23 nt, Artificial Sequence
  Chemically synthesized
agacuacuggagcagggagaaga

SEQ ID NO: 86946 - RNA, 23 nt, Artificial Sequence
  Chemically synthesized
gacuacuggagcagggagaagag

SEQ ID NO: 86947 - RNA, 23 nt, Artificial Sequence
  Chemically synthesized
acuacuggagcagggagaagagg

SEQ ID NO: 86948 - RNA, 23 nt, Artificial Sequence
  Chemically synthesized
cuacuggagcagggagaagaggg

SEQ ID NO: 86949 - RNA, 23 nt, Artificial Sequence
  Chemically synthesized
uacuggagcagggagaagagggc

SEQ ID NO: 86950 - RNA, 23 nt, Artificial Sequence
  Chemically synthesized
cauacagacaugcacacacauag

SEQ ID NO: 86951 - RNA, 23 nt, Artificial Sequence
  Chemically synthesized
auacagacaugcacacacauagu

SEQ ID NO: 86952 - RNA, 23 nt, Artificial Sequence
  Chemically synthesized
acagacaugcacacacauaguac

SEQ ID NO: 86953 - RNA, 23 nt, Artificial Sequence
  Chemically synthesized
cagacaugcacacacauaguacu

SEQ ID NO: 86954 - RNA, 23 nt, Artificial Sequence
  Chemically synthesized
gagguuguuguaccacccaucaa

SEQ ID NO: 86955 - RNA, 23 nt, Artificial Sequence
  Chemically synthesized
ccgguucagaaccuucuggaagu

SEQ ID NO: 86956 - RNA, 23 nt, Artificial Sequence
  Chemically synthesized
cgguucagaaccuucuggaagug

SEQ ID NO: 86957 - RNA, 23 nt, Artificial Sequence
  Chemically synthesized
gguucagaaccuucuggaagugc

SEQ ID NO: 86958 - RNA, 23 nt, Artificial Sequence
  Chemically synthesized
ugaugagcaggacauagagcagg

SEQ ID NO: 86959 - RNA, 23 nt, Artificial Sequence
  Chemically synthesized
ugaggaagguuucucgcaggaag

SEQ ID NO: 86960 - RNA, 23 nt, Artificial Sequence
  Chemically synthesized
uucaugaagaccaccaggauguc

SEQ ID NO: 86961 - RNA, 23 nt, Artificial Sequence
  Chemically synthesized
ucaugaagaccaccaggaugucc

SEQ ID NO: 86962 - RNA, 23 nt, Artificial Sequence
  Chemically synthesized
uguugauaacagcgaccagcacg

SEQ ID NO: 86963 - RNA, 23 nt, Artificial Sequence
  Chemically synthesized
ggccagaaaucccgcacaucuuc

SEQ ID NO: 86964 - RNA, 23 nt, Artificial Sequence
  Chemically synthesized
gccagaaaucccgcacaucuuca

SEQ ID NO: 86965 - RNA, 23 nt, Artificial Sequence
  Chemically synthesized
ccagaaaucccgcacaucuucaa

SEQ ID NO: 86966 - RNA, 23 nt, Artificial Sequence
  Chemically synthesized
cagaaaucccgcacaucuucaac

SEQ ID NO: 86967 - RNA, 23 nt, Artificial Sequence
  Chemically synthesized
uugucaggucagcuugucuucug

SEQ ID NO: 86968 - RNA, 23 nt, Artificial Sequence
  Chemically synthesized
gguccugguggucauucuccucc

SEQ ID NO: 86969 - RNA, 23 nt, Artificial Sequence
  Chemically synthesized
guccugguggucauucuccucca

SEQ ID NO: 86970 - RNA, 23 nt, Artificial Sequence
  Chemically synthesized
uccugguggucauucuccuccac

SEQ ID NO: 86971 - RNA, 23 nt, Artificial Sequence
  Chemically synthesized
gaugucagccagccacucaaacu

SEQ ID NO: 86972 - RNA, 23 nt, Artificial Sequence
  Chemically synthesized
augucagccagccacucaaacug

SEQ ID NO: 86973 - RNA, 23 nt, Artificial Sequence
  Chemically synthesized
ugucagccagccacucaaacuga

SEQ ID NO: 86974 - RNA, 23 nt, Artificial Sequence
  Chemically synthesized
gucagccagccacucaaacugac

SEQ ID NO: 86975 - RNA, 23 nt, Artificial Sequence
  Chemically synthesized
ucagccagccacucaaacugacg

SEQ ID NO: 86976 - RNA, 23 nt, Artificial Sequence
  Chemically synthesized
agaugauugcugggaccaggaag

SEQ ID NO: 86977 - RNA, 23 nt, Artificial Sequence
  Chemically synthesized
gaugauugcugggaccaggaaga

SEQ ID NO: 86978 - RNA, 23 nt, Artificial Sequence
  Chemically synthesized
augauugcugggaccaggaagaa

SEQ ID NO: 86979 - RNA, 23 nt, Artificial Sequence
  Chemically synthesized
gaacagguacacauucaccacau

SEQ ID NO: 86980 - RNA, 23 nt, Artificial Sequence
  Chemically synthesized
aacagguacacauucaccacaug

SEQ ID NO: 86981 - RNA, 23 nt, Artificial Sequence
  Chemically synthesized
gucaguuccuccuuguccuggaa

SEQ ID NO: 86982 - RNA, 23 nt, Artificial Sequence
  Chemically synthesized
uguggccuugccauuccaaagcu

SEQ ID NO: 86983 - RNA, 23 nt, Artificial Sequence
  Chemically synthesized
guggccuugccauuccaaagcuu

SEQ ID NO: 86984 - RNA, 23 nt, Artificial Sequence
  Chemically synthesized
ucucagacacgaugcucuggcgg

SEQ ID NO: 86985 - RNA, 23 nt, Artificial Sequence
  Chemically synthesized
cuucaaucuccuucuuggagaac

SEQ ID NO: 86986 - RNA, 23 nt, Artificial Sequence
  Chemically synthesized
uucaaucuccuucuuggagaaca

SEQ ID NO: 86987 - RNA, 23 nt, Artificial Sequence
  Chemically synthesized
caggccagaaaucccgcacaucu

SEQ ID NO: 86988 - RNA, 23 nt, Artificial Sequence
  Chemically synthesized
aggccagaaaucccgcacaucuu

SEQ ID NO: 86989 - RNA, 23 nt, Artificial Sequence
  Chemically synthesized
uagguauugggccagggucugau

SEQ ID NO: 86990 - RNA, 23 nt, Artificial Sequence
  Chemically synthesized
agguauugggccagggucugaug

SEQ ID NO: 86991 - RNA, 23 nt, Artificial Sequence
  Chemically synthesized
gguauugggccagggucugauga

SEQ ID NO: 86992 - RNA, 23 nt, Artificial Sequence
  Chemically synthesized
guauugggccagggucugaugaa

SEQ ID NO: 86993 - RNA, 23 nt, Artificial Sequence
  Chemically synthesized
uauugggccagggucugaugaaa

SEQ ID NO: 86994 - RNA, 23 nt, Artificial Sequence
  Chemically synthesized
ccccaacacacauacagacaugc

SEQ ID NO: 86995 - RNA, 23 nt, Artificial Sequence
  Chemically synthesized
cccaacacacauacagacaugca

SEQ ID NO: 86996 - RNA, 23 nt, Artificial Sequence
  Chemically synthesized
ccaacacacauacagacaugcac

SEQ ID NO: 86997 - RNA, 23 nt, Artificial Sequence
  Chemically synthesized
caacacacauacagacaugcaca

SEQ ID NO: 86998 - RNA, 23 nt, Artificial Sequence
  Chemically synthesized
aacacacauacagacaugcacac

SEQ ID NO: 86999 - RNA, 23 nt, Artificial Sequence
  Chemically synthesized
gaggucgaacuucucagccagcu

SEQ ID NO: 87000 - RNA, 23 nt, Artificial Sequence
  Chemically synthesized
aggucgaacuucucagccagcug

SEQ ID NO: 87001 - RNA, 23 nt, Artificial Sequence
  Chemically synthesized
ggucgaacuucucagccagcugg

SEQ ID NO: 87002 - RNA, 23 nt, Artificial Sequence
  Chemically synthesized
gucgaacuucucagccagcuggg

SEQ ID NO: 87003 - RNA, 23 nt, Artificial Sequence
  Chemically synthesized
ucgaacuucucagccagcugggu

SEQ ID NO: 87004 - RNA, 23 nt, Artificial Sequence
  Chemically synthesized
cugguggucauucuccuccaccu

SEQ ID NO: 87005 - RNA, 23 nt, Artificial Sequence
  Chemically synthesized
ugguggucauucuccuccaccuc

SEQ ID NO: 87006 - RNA, 23 nt, Artificial Sequence
  Chemically synthesized
gguggucauucuccuccaccucu

SEQ ID NO: 87007 - RNA, 23 nt, Artificial Sequence
  Chemically synthesized
ccacauggcccacacuguguaag

SEQ ID NO: 87008 - RNA, 23 nt, Artificial Sequence
  Chemically synthesized
cacauggcccacacuguguaaga

SEQ ID NO: 87009 - RNA, 23 nt, Artificial Sequence
  Chemically synthesized
acauggcccacacuguguaagac

SEQ ID NO: 87010 - RNA, 23 nt, Artificial Sequence
  Chemically synthesized
cauggcccacacuguguaagacu

SEQ ID NO: 87011 - RNA, 23 nt, Artificial Sequence
  Chemically synthesized
auggcccacacuguguaagacug

SEQ ID NO: 87012 - RNA, 23 nt, Artificial Sequence
  Chemically synthesized
ugaugacuucaggcaccuccacc

SEQ ID NO: 87013 - RNA, 23 nt, Artificial Sequence
  Chemically synthesized
gaugacuucaggcaccuccaccc

SEQ ID NO: 87014 - RNA, 23 nt, Artificial Sequence
  Chemically synthesized
augacuucaggcaccuccacccc

SEQ ID NO: 87015 - RNA, 23 nt, Artificial Sequence
  Chemically synthesized
agucguacaugcggaacauaagg

SEQ ID NO: 87016 - RNA, 23 nt, Artificial Sequence
  Chemically synthesized
ggggucuccuuuaugccagacaa

SEQ ID NO: 87017 - RNA, 23 nt, Artificial Sequence
  Chemically synthesized
gggucuccuuuaugccagacaaa

SEQ ID NO: 87018 - RNA, 23 nt, Artificial Sequence
  Chemically synthesized
acuccgggaguguuuucugcagg

SEQ ID NO: 87019 - RNA, 23 nt, Artificial Sequence
  Chemically synthesized
cuccgggaguguuuucugcagga

SEQ ID NO: 87020 - RNA, 23 nt, Artificial Sequence
  Chemically synthesized
uccgggaguguuuucugcaggaa

SEQ ID NO: 87021 - RNA, 23 nt, Artificial Sequence
  Chemically synthesized
acacacauacagacaugcacaca

SEQ ID NO: 87022 - RNA, 23 nt, Artificial Sequence
  Chemically synthesized
cacacauacagacaugcacacac

SEQ ID NO: 87023 - RNA, 23 nt, Artificial Sequence
  Chemically synthesized
acacauacagacaugcacacaca

SEQ ID NO: 87024 - RNA, 23 nt, Artificial Sequence
  Chemically synthesized
agacaugcacacacauaguacuu

SEQ ID NO: 87025 - RNA, 23 nt, Artificial Sequence
  Chemically synthesized
ucucacucuagucccuagacacu

SEQ ID NO: 87026 - RNA, 23 nt, Artificial Sequence
  Chemically synthesized
ucggaugaugucagccagccacu

SEQ ID NO: 87027 - RNA, 23 nt, Artificial Sequence
  Chemically synthesized
cggaugaugucagccagccacuc

SEQ ID NO: 87028 - RNA, 23 nt, Artificial Sequence
  Chemically synthesized
ggaugaugucagccagccacuca

SEQ ID NO: 87029 - RNA, 23 nt, Artificial Sequence
  Chemically synthesized
gaugaugucagccagccacucaa

SEQ ID NO: 87030 - RNA, 23 nt, Artificial Sequence
  Chemically synthesized
augaugucagccagccacucaaa

SEQ ID NO: 87031 - RNA, 23 nt, Artificial Sequence
  Chemically synthesized
acggucuggaagaaccaccagua

SEQ ID NO: 87032 - RNA, 23 nt, Artificial Sequence
  Chemically synthesized
cggucuggaagaaccaccaguaa

SEQ ID NO: 87033 - RNA, 23 nt, Artificial Sequence
  Chemically synthesized
ggucuggaagaaccaccaguaau

SEQ ID NO: 87034 - RNA, 23 nt, Artificial Sequence
  Chemically synthesized
gucuggaagaaccaccaguaaua

SEQ ID NO: 87035 - RNA, 23 nt, Artificial Sequence
  Chemically synthesized
ucuggaagaaccaccaguaauac

SEQ ID NO: 87036 - RNA, 23 nt, Artificial Sequence
  Chemically synthesized
ugccauccuugucagccagagag

SEQ ID NO: 87037 - RNA, 23 nt, Artificial Sequence
  Chemically synthesized
gccauccuugucagccagagaga

SEQ ID NO: 87038 - RNA, 23 nt, Artificial Sequence
  Chemically synthesized
ccauccuugucagccagagagaa

SEQ ID NO: 87039 - RNA, 23 nt, Artificial Sequence
  Chemically synthesized
cauccuugucagccagagagaac

SEQ ID NO: 87040 - RNA, 23 nt, Artificial Sequence
  Chemically synthesized
cuccaggaaugcgaggaaccaua

SEQ ID NO: 87041 - RNA, 23 nt, Artificial Sequence
  Chemically synthesized
uccaggaaugcgaggaaccauag

SEQ ID NO: 87042 - RNA, 23 nt, Artificial Sequence
  Chemically synthesized
ccaggaaugcgaggaaccauaga

SEQ ID NO: 87043 - RNA, 23 nt, Artificial Sequence
  Chemically synthesized
uucuccaggcugagacacauccu

SEQ ID NO: 87044 - RNA, 23 nt, Artificial Sequence
  Chemically synthesized
ucucauaauggugggagaaguga

SEQ ID NO: 87045 - RNA, 23 nt, Artificial Sequence
  Chemically synthesized
acuuaugccacuccugguggccc

SEQ ID NO: 87046 - RNA, 23 nt, Artificial Sequence
  Chemically synthesized
gguccaucaagguacagcuuugg

SEQ ID NO: 87047 - RNA, 23 nt, Artificial Sequence
  Chemically synthesized
aucucagcauccugaugaacuca

SEQ ID NO: 87048 - RNA, 23 nt, Artificial Sequence
  Chemically synthesized
ucucagcauccugaugaacucau

SEQ ID NO: 87049 - RNA, 23 nt, Artificial Sequence
  Chemically synthesized
cucagcauccugaugaacucauc

SEQ ID NO: 87050 - RNA, 23 nt, Artificial Sequence
  Chemically synthesized
gucacagcugcucucaucagcuc

SEQ ID NO: 87051 - RNA, 23 nt, Artificial Sequence
  Chemically synthesized
ucacagcugcucucaucagcucc

SEQ ID NO: 87052 - RNA, 23 nt, Artificial Sequence
  Chemically synthesized
caccaucccguagccgcacaaau

SEQ ID NO: 87053 - RNA, 23 nt, Artificial Sequence
  Chemically synthesized
ccagaagaggaggagguauggga

SEQ ID NO: 87054 - RNA, 23 nt, Artificial Sequence
  Chemically synthesized
cagaagaggaggagguaugggag

SEQ ID NO: 87055 - RNA, 23 nt, Artificial Sequence
  Chemically synthesized
agaagaggaggagguaugggagu

SEQ ID NO: 87056 - RNA, 23 nt, Artificial Sequence
  Chemically synthesized
gaagaggaggagguaugggagua

SEQ ID NO: 87057 - RNA, 23 nt, Artificial Sequence
  Chemically synthesized
aagaggaggagguaugggaguag

SEQ ID NO: 87058 - RNA, 23 nt, Artificial Sequence
  Chemically synthesized
cucacucuagucccuagacacug

SEQ ID NO: 87059 - RNA, 23 nt, Artificial Sequence
  Chemically synthesized
ucacucuagucccuagacacugc

SEQ ID NO: 87060 - RNA, 23 nt, Artificial Sequence
  Chemically synthesized
acugacuauggccaccuggaaca

SEQ ID NO: 87061 - RNA, 23 nt, Artificial Sequence
  Chemically synthesized
cugacuauggccaccuggaacaa

SEQ ID NO: 87062 - RNA, 23 nt, Artificial Sequence
  Chemically synthesized
ggccugguacggucuggaagaac

SEQ ID NO: 87063 - RNA, 23 nt, Artificial Sequence
  Chemically synthesized
gccugguacggucuggaagaacc

SEQ ID NO: 87064 - RNA, 23 nt, Artificial Sequence
  Chemically synthesized
ccugguacggucuggaagaacca

SEQ ID NO: 87065 - RNA, 23 nt, Artificial Sequence
  Chemically synthesized
cugguacggucuggaagaaccac

SEQ ID NO: 87066 - RNA, 23 nt, Artificial Sequence
  Chemically synthesized
ugguacggucuggaagaaccacc

SEQ ID NO: 87067 - RNA, 23 nt, Artificial Sequence
  Chemically synthesized
gcaguuguuggagaucucgauga

SEQ ID NO: 87068 - RNA, 23 nt, Artificial Sequence
  Chemically synthesized
caguuguuggagaucucgaugaa

SEQ ID NO: 87069 - RNA, 23 nt, Artificial Sequence
  Chemically synthesized
aguuguuggagaucucgaugaag

SEQ ID NO: 87070 - RNA, 23 nt, Artificial Sequence
  Chemically synthesized
caccaggauguccaggaacucuc

SEQ ID NO: 87071 - RNA, 23 nt, Artificial Sequence
  Chemically synthesized
accaggauguccaggaacucucg

SEQ ID NO: 87072 - RNA, 23 nt, Artificial Sequence
  Chemically synthesized
ccaggauguccaggaacucucgg

SEQ ID NO: 87073 - RNA, 23 nt, Artificial Sequence
  Chemically synthesized
caggauguccaggaacucucgga

SEQ ID NO: 87074 - RNA, 23 nt, Artificial Sequence
  Chemically synthesized
aggauguccaggaacucucggaa

SEQ ID NO: 87075 - RNA, 23 nt, Artificial Sequence
  Chemically synthesized
cccgaagccaaauccacugcccu

SEQ ID NO: 87076 - RNA, 23 nt, Artificial Sequence
  Chemically synthesized
ccgaagccaaauccacugcccuc

SEQ ID NO: 87077 - RNA, 23 nt, Artificial Sequence
  Chemically synthesized
cgaagccaaauccacugcccuca

SEQ ID NO: 87078 - RNA, 23 nt, Artificial Sequence
  Chemically synthesized
gaagccaaauccacugcccucaa

SEQ ID NO: 87079 - RNA, 23 nt, Artificial Sequence
  Chemically synthesized
aagccaaauccacugcccucaaa

SEQ ID NO: 87080 - RNA, 23 nt, Artificial Sequence
  Chemically synthesized
cauagguauugggccagggucug

SEQ ID NO: 87081 - RNA, 23 nt, Artificial Sequence
  Chemically synthesized
auagguauugggccagggucuga

SEQ ID NO: 87082 - RNA, 23 nt, Artificial Sequence
  Chemically synthesized
ugcuuaaaaccuugggugaaauu

SEQ ID NO: 87083 - RNA, 23 nt, Artificial Sequence
  Chemically synthesized
aaauggcuugccauggguccagc

SEQ ID NO: 87084 - RNA, 23 nt, Artificial Sequence
  Chemically synthesized
uaccuccugcaaggcauuugcca

SEQ ID NO: 87085 - RNA, 23 nt, Artificial Sequence
  Chemically synthesized
accuccugcaaggcauuugccag

SEQ ID NO: 87086 - RNA, 23 nt, Artificial Sequence
  Chemically synthesized
ccuccugcaaggcauuugccagc

SEQ ID NO: 87087 - RNA, 23 nt, Artificial Sequence
  Chemically synthesized
cuccugcaaggcauuugccagcc

SEQ ID NO: 87088 - RNA, 23 nt, Artificial Sequence
  Chemically synthesized
uccugcaaggcauuugccagccc

SEQ ID NO: 87089 - RNA, 19 nt, Artificial Sequence
  Chemically synthesized
cgaucguagaaacacagaa

SEQ ID NO: 87090 - RNA, 19 nt, Artificial Sequence
  Chemically synthesized
uucuguguuucuacgaucg

SEQ ID NO: 87091 - RNA, 19 nt, Artificial Sequence
  Chemically synthesized
aggcggaacuuguaggaac

SEQ ID NO: 87092 - RNA, 19 nt, Artificial Sequence
  Chemically synthesized
guuccuacaaguuccgccu

SEQ ID NO: 87093 - RNA, 19 nt, Artificial Sequence
  Chemically synthesized
ccuggagcgaucguagaaa

SEQ ID NO: 87094 - RNA, 19 nt, Artificial Sequence
  Chemically synthesized
uuucuacgaucgcuccagg

SEQ ID NO: 87095 - RNA, 19 nt, Artificial Sequence
  Chemically synthesized
cuggagcgaucguagaaac

SEQ ID NO: 87096 - RNA, 19 nt, Artificial Sequence
  Chemically synthesized
guuucuacgaucgcuccag

SEQ ID NO: 87097 - RNA, 19 nt, Artificial Sequence
  Chemically synthesized
ccuuggagaaagcugguuc

SEQ ID NO: 87098 - RNA, 19 nt, Artificial Sequence
  Chemically synthesized
gaaccagcuuucuccaagg

SEQ ID NO: 87099 - RNA, 19 nt, Artificial Sequence
  Chemically synthesized
uggaaauccagcugcagaa

SEQ ID NO: 87100 - RNA, 19 nt, Artificial Sequence
  Chemically synthesized
uucugcagcuggauuucca

SEQ ID NO: 87101 - RNA, 19 nt, Artificial Sequence
  Chemically synthesized
gggaugauaaagacacgau

SEQ ID NO: 87102 - RNA, 19 nt, Artificial Sequence
  Chemically synthesized
aucgugucuuuaucauccc

SEQ ID NO: 87103 - RNA, 19 nt, Artificial Sequence
  Chemically synthesized
gucuucuugauuugcuuuu

SEQ ID NO: 87104 - RNA, 19 nt, Artificial Sequence
  Chemically synthesized
aaaagcaaaucaagaagac

SEQ ID NO: 87105 - RNA, 19 nt, Artificial Sequence
  Chemically synthesized
ccaauacugacccucuuua

SEQ ID NO: 87106 - RNA, 19 nt, Artificial Sequence
  Chemically synthesized
uaaagagggucaguauugg

SEQ ID NO: 87107 - RNA, 19 nt, Artificial Sequence
  Chemically synthesized
ccuucuuaaagccuuauuu

SEQ ID NO: 87108 - RNA, 19 nt, Artificial Sequence
  Chemically synthesized
aaauaaggcuuuaagaagg

SEQ ID NO: 87109 - RNA, 19 nt, Artificial Sequence
  Chemically synthesized
ggagauuggugcuguaaaa

SEQ ID NO: 87110 - RNA, 19 nt, Artificial Sequence
  Chemically synthesized
uuuuacagcaccaaucucc

SEQ ID NO: 87111 - RNA, 19 nt, Artificial Sequence
  Chemically synthesized
gggcauuuaauucaucuuu

SEQ ID NO: 87112 - RNA, 19 nt, Artificial Sequence
  Chemically synthesized
aaagaugaauuaaaugccc

SEQ ID NO: 87113 - RNA, 19 nt, Artificial Sequence
  Chemically synthesized
cgaguuuucugaccagcuu

SEQ ID NO: 87114 - RNA, 19 nt, Artificial Sequence
  Chemically synthesized
aagcuggucagaaaacucg

SEQ ID NO: 87115 - RNA, 19 nt, Artificial Sequence
  Chemically synthesized
gcagaauuguggaguguuu

SEQ ID NO: 87116 - RNA, 19 nt, Artificial Sequence
  Chemically synthesized
aaacacuccacaauucugc

SEQ ID NO: 87117 - RNA, 19 nt, Artificial Sequence
  Chemically synthesized
gguguaaaaaucauguguu

SEQ ID NO: 87118 - RNA, 19 nt, Artificial Sequence
  Chemically synthesized
aacacaugauuuuuacacc

SEQ ID NO: 87119 - RNA, 19 nt, Artificial Sequence
  Chemically synthesized
gugauuccuauucgauauu

SEQ ID NO: 87120 - RNA, 19 nt, Artificial Sequence
  Chemically synthesized
aauaucgaauaggaaucac

SEQ ID NO: 87121 - RNA, 19 nt, Artificial Sequence
  Chemically synthesized
ggccuuuuucauuuaucua

SEQ ID NO: 87122 - RNA, 19 nt, Artificial Sequence
  Chemically synthesized
uagauaaaugaaaaaggcc

SEQ ID NO: 87123 - RNA, 19 nt, Artificial Sequence
  Chemically synthesized
ugagagagguuuuugaaau

SEQ ID NO: 87124 - RNA, 19 nt, Artificial Sequence
  Chemically synthesized
auuucaaaaaccucucuca

SEQ ID NO: 87125 - RNA, 19 nt, Artificial Sequence
  Chemically synthesized
ggugggcaguuuuuugaaa

SEQ ID NO: 87126 - RNA, 19 nt, Artificial Sequence
  Chemically synthesized
uuucaaaaaacugcccacc

SEQ ID NO: 87127 - RNA, 19 nt, Artificial Sequence
  Chemically synthesized
cagaaaagcccaaguucau

SEQ ID NO: 87128 - RNA, 19 nt, Artificial Sequence
  Chemically synthesized
augaacuugggcuuuucug

SEQ ID NO: 87129 - RNA, 19 nt, Artificial Sequence
  Chemically synthesized
cuaauacugucauccucaa

SEQ ID NO: 87130 - RNA, 19 nt, Artificial Sequence
  Chemically synthesized
uugaggaugacaguauuag

SEQ ID NO: 87131 - RNA, 19 nt, Artificial Sequence
  Chemically synthesized
gcuagacgugggaagaaaa

SEQ ID NO: 87132 - RNA, 19 nt, Artificial Sequence
  Chemically synthesized
uuuucuucccacgucuagc

SEQ ID NO: 87133 - RNA, 19 nt, Artificial Sequence
  Chemically synthesized
caacuacuaauagaauaaa

SEQ ID NO: 87134 - RNA, 19 nt, Artificial Sequence
  Chemically synthesized
uuuauucuauuaguaguug

SEQ ID NO: 87135 - RNA, 19 nt, Artificial Sequence
  Chemically synthesized
guguauugguuuuuuaaaa

SEQ ID NO: 87136 - RNA, 19 nt, Artificial Sequence
  Chemically synthesized
uuuuaaaaaaccaauacac

SEQ ID NO: 87137 - RNA, 19 nt, Artificial Sequence
  Chemically synthesized
cggaaugaugagcacacaa

SEQ ID NO: 87138 - RNA, 19 nt, Artificial Sequence
  Chemically synthesized
uugugugcucaucauuccg

SEQ ID NO: 87139 - RNA, 19 nt, Artificial Sequence
  Chemically synthesized
gaaggaucuucggaaugau

SEQ ID NO: 87140 - RNA, 19 nt, Artificial Sequence
  Chemically synthesized
aucauuccgaagauccuuc

SEQ ID NO: 87141 - RNA, 19 nt, Artificial Sequence
  Chemically synthesized
ccagcugacuaaacuuuuu

SEQ ID NO: 87142 - RNA, 19 nt, Artificial Sequence
  Chemically synthesized
aaaaaguuuagucagcugg

SEQ ID NO: 87143 - RNA, 19 nt, Artificial Sequence
  Chemically synthesized
ucggaaugaugagcacaca

SEQ ID NO: 87144 - RNA, 19 nt, Artificial Sequence
  Chemically synthesized
ugugugcucaucauuccga

SEQ ID NO: 87145 - RNA, 19 nt, Artificial Sequence
  Chemically synthesized
agucagauggaaaauucau

SEQ ID NO: 87146 - RNA, 19 nt, Artificial Sequence
  Chemically synthesized
augaauuuuccaucugacu

SEQ ID NO: 87147 - RNA, 19 nt, Artificial Sequence
  Chemically synthesized
gucagauggaaaauucauu

SEQ ID NO: 87148 - RNA, 19 nt, Artificial Sequence
  Chemically synthesized
aaugaauuuuccaucugac

SEQ ID NO: 87149 - RNA, 19 nt, Artificial Sequence
  Chemically synthesized
ucgacagcccugauaguuu

SEQ ID NO: 87150 - RNA, 19 nt, Artificial Sequence
  Chemically synthesized
aaacuaucagggcugucga

SEQ ID NO: 87151 - RNA, 19 nt, Artificial Sequence
  Chemically synthesized
gcuguggcagaguuacagu

SEQ ID NO: 87152 - RNA, 19 nt, Artificial Sequence
  Chemically synthesized
acuguaacucugccacagc

SEQ ID NO: 87153 - RNA, 19 nt, Artificial Sequence
  Chemically synthesized
ggaucauguaaaugcucaa

SEQ ID NO: 87154 - RNA, 19 nt, Artificial Sequence
  Chemically synthesized
uugagcauuuacaugaucc

SEQ ID NO: 87155 - RNA, 19 nt, Artificial Sequence
  Chemically synthesized
cccuuacuauucccacuuu

SEQ ID NO: 87156 - RNA, 19 nt, Artificial Sequence
  Chemically synthesized
aaagugggaauaguaaggg

SEQ ID NO: 87157 - RNA, 19 nt, Artificial Sequence
  Chemically synthesized
ccugacaagugaaguugua

SEQ ID NO: 87158 - RNA, 19 nt, Artificial Sequence
  Chemically synthesized
uacaacuucacuugucagg

SEQ ID NO: 87159 - RNA, 19 nt, Artificial Sequence
  Chemically synthesized
ccuuauugaucuuugccca

SEQ ID NO: 87160 - RNA, 19 nt, Artificial Sequence
  Chemically synthesized
ugggcaaagaucaauaagg

SEQ ID NO: 87161 - RNA, 19 nt, Artificial Sequence
  Chemically synthesized
caggaauguuucagcugca

SEQ ID NO: 87162 - RNA, 19 nt, Artificial Sequence
  Chemically synthesized
ugcagcugaaacauuccug

SEQ ID NO: 87163 - RNA, 19 nt, Artificial Sequence
  Chemically synthesized
gacugcacaggaaaugcaa

SEQ ID NO: 87164 - RNA, 19 nt, Artificial Sequence
  Chemically synthesized
uugcauuuccugugcaguc

SEQ ID NO: 87165 - RNA, 19 nt, Artificial Sequence
  Chemically synthesized
cuacagaacaaaccaaaaa

SEQ ID NO: 87166 - RNA, 19 nt, Artificial Sequence
  Chemically synthesized
uuuuugguuuguucuguag

SEQ ID NO: 87167 - RNA, 19 nt, Artificial Sequence
  Chemically synthesized
gaauguggaacuccucaac

SEQ ID NO: 87168 - RNA, 19 nt, Artificial Sequence
  Chemically synthesized
guugaggaguuccacauuc

SEQ ID NO: 87169 - RNA, 19 nt, Artificial Sequence
  Chemically synthesized
ucuucaagcuuuugggcua

SEQ ID NO: 87170 - RNA, 19 nt, Artificial Sequence
  Chemically synthesized
uagcccaaaagcuugaaga

SEQ ID NO: 87171 - RNA, 19 nt, Artificial Sequence
  Chemically synthesized
gaacaaaccaaaaauguuc

SEQ ID NO: 87172 - RNA, 19 nt, Artificial Sequence
  Chemically synthesized
gaacauuuuugguuuguuc

SEQ ID NO: 87173 - RNA, 19 nt, Artificial Sequence
  Chemically synthesized
cagaauguggaacuccuca

SEQ ID NO: 87174 - RNA, 19 nt, Artificial Sequence
  Chemically synthesized
ugaggaguuccacauucug

SEQ ID NO: 87175 - RNA, 19 nt, Artificial Sequence
  Chemically synthesized
cagaacaaaccaaaaaugu

SEQ ID NO: 87176 - RNA, 19 nt, Artificial Sequence
  Chemically synthesized
acauuuuugguuuguucug

SEQ ID NO: 87177 - RNA, 19 nt, Artificial Sequence
  Chemically synthesized
cagaauuuugcacaguuac

SEQ ID NO: 87178 - RNA, 19 nt, Artificial Sequence
  Chemically synthesized
guaacugugcaaaauucug
